United States Patent Application Publication US 2026/0109938 A1 - sequence listing, part 6

SEQ ID NO: 3 - DNA, 3977413 bp, Escherichia coli (residues 1,988,708-3,977,413 of 3,977,413)
  misc_feature 1..3977413: note = Synthetic E.coli genome
  source 1..3977413: mol_type = genomic DNA
cgtccgtttacctttggtgactggctggtattgattgtcctgaccgccgtaatggtctgggtgatttggggcgtgatcgttaatgcctggtttattccagaaattgccagccagttcttcaccatgggtctggtgattggcatcatcggcgttgttttccgccttaacggcatgacggttaataccatggctagttcctttaccgaaggggcgcgaatgatgatcgcccctgccctgctggtgggtttcgccaaagggattttgctgctggtcggtaatggtgaagcgggtgatgccagcgtgttaaataccatcctcaacagcattgccaatgccattagcggtctggacaacgcggtcgcggcctggtttatgttgctcttccaggcggtatttaatttcttcgtgacgtccggttctggtcaggcggcgttaaccatgccgttactggcaccgcttggcgatctggtcggtgttaaccgtcaggttaccgtgctggcgttccagtttggtgatggcttcagtcacatcatttacccaaccagtgcgagcttaatggcaacgctcggtgtgtgcagggtggacttccgtaactggctgaaggtgggcgcgaccctacttggactgctgtttattatgtccagcgtcgtagtgatcggcgctcagttgatgggctaccactaaaaatgttaagagccgcaattgcggctcttttttcattctgccgtttcagtctctacggcttcatttttggcattgcgcttcatccacaacgctagcgctttcaggctgtctggagtgaactcatcgcagcgtgcggtgatttcttccggcgtcagccagcaaacttcactgacttcatcttcctgtagtgcgaagggaccgtgagagacgcagctgaacaatgcgccccagacacggcaatttttatcttcgaaatagaactgcccgtgctcggcaaaggggacaccggcaatgcccaactcttcttccgcttcgcgacgcgcggattccagcagttgctcatcggcctggactacaccgcctgcggtcgcatctaacatgccgggtaaaaagtcttttgtctcggtacgacgctggaccagaattttgcccatgccatcatgcacgacgatgtaagttgcacgatgacgcagacactgtgcccgcatttgttcccggctggcttgtgcaatgacttcgttctcttcattgacaatatccacccattcagtacttgccaaacgacgctgttccattatcaggaaaccttctttttctggcgctcttacggcgcattttgagttgtgggtaaattacggattaatcgcgacctgcgcaatgatactttgatcattgagtgcgattacactaagtacgtcattatccagcatgccataactcgccggattaccgcctttcggaatactcacgctgccggggttgaagtggaaaatctccccccgctgttctgccactggcagatgggtatgaccgtacaccagcacatcgttctggtttaaagcaggcagattttccgggccaaaaagatgaccatgcgtcaaaaacagacgttgtttttccagtaatacctgttgccacggcgcggttatcgggaaatgcagcagcatttgatccacttcgctgtcgcagttgccgcgcacagcgataaccttatgtgccacttcattaagccgttcagcgactttggctggcgcgtaaccctccggtaaagcattacgcgggccgtgattcaacacgtcgccaaggatcaccagccactgggcaccgctttgggcaaacaactccagaacacgttccgtcgccggtaagctcccatgaatgtcgcttgcaaacatcagtttcatcactcactcctcgtcgaaaaaacgtaagctatgatactggattctgtcgttgctatcagccagattgcttcgcgctaagtgcaataaaacgctggacagacgctcgctgccactggaatgttgcataatccaccaggcgttctggcacctcatcgccatgtagtaccaggcggttaatcattagcgccagatcagtatcagcaatgcaccattcaccaaataaattcggctgacccagtactaacaaatgttctgccatcgcgaacagtttctctgcactggcttttccctcggccgttagtggcgcttttttcgcccccgcaaagacaacatccgtcggacgctcttcgcggatgggcatcagatcgctgcgcagccaggcctgaatctgtcgtgcacgcgcacgattttctaaatcaagcggataaatacgttcccaggtcggtggcgcaaatcgatcttccagatactccgcaatggcagaagattcactcaactcaaaatcatcgatttgtaataacggcacacggcgtgtctgaccgtaaccttgccacgtcggctgcaaatgttcaccgctgtcgaggtcgatggtcttgatatgaaagctcaggcctttttcctgcaacgccacccaggcggataacacataaggggagaaaaagtgggcatcactccaaagcgtgatagcgggtttactcattatgtcctcggcaataaagggggctggctatcaaactatagagcctttttgtcactgtcacgtgacgaatactcacgtaagtcgccgcgctttctatacttgtggtgttcagatgattaaacaaccggagctgcaatgatcgatctctatttcgccccgacacccaatggtcacaaaattacgctgtttctcgaagaagcagagctggattatcgcttgattaaggtagacctggggaaaggcggtcagtttcgtccggaatttttgcgcattagccccaacaacaaaattccggcaattgttgatcattctcctgccgatggcggcgaaccgctaagcctctttgagtctggtgccattttgttgtatctggctgagaaaacaggactctttttgagtcatgaaacgcgtgagcgcgccgccacattacagtggttattctggcaggtaggcggactggggccgatgcttgggcaaaatcatcattttaatcacgcagccccccaaaccattccttacgctattgaacgttatcaggttgaaactcagcgtctttaccatgtactgaacaagcggctggaaaacagcccctggctgggaggcgagaactacagcattgcggatattgcctgctggccgtgggttaatgcctggactcgccagcgaattgacctagcaatgtatccggcagtcaagaactggcatgagcggatccgtagccgccctgccaccgggcaggcactgctaaaagcacaactcggtgatgagcgtagcgatagttaacagaaacaggttctcgtgtattatttcatcctaagtaaaacaacggagaacctgcaatggcacaacctgccgctattattcgtataaagaaccttcgtttgcgtacgtttatcggaattaaggaagaagaaattaacaaccgtcaggatattgttatcaatgtgacgatccactaccccgccgataaagcgcgcactagcgaagatatcaacgatgcgctgaattatcgcaccgtaacgaaaaacattattcagcatgtagagaataaccgtttctctttgctggaaaaattaactcaggatgtgctcgatatcgcacgtgaacatcactgggtgacgtatgctgaagtggagatcgataaactgcacgcgctgcgctacgccgatagcgtatccatgaccttaagctggcagcgttaatcgccatatcgggaggctgcatgaacatagtgatcaccggagggacaggattaattggtcgccatttgattccgcgtttgctggagctgggccatcaaattacggtagtgacgcgtaacccgcagaaagccagttccgttctcggccctcgggtgacactatggcaagggcttgccgatcaaagcaacctcaacggcgttgatgcggtaatcaacctggccggagaaccgattgctgataaacgctggactcacgagcaaaaagagcgtctctgccaaagccgctggaatatcacgcaaaaactggtcgatttgattaatgccagcgacacgccaccgagcgtactcatttccggcagcgcaacgggctattatggtgacttaggtgaagtggtggttaccgaagaggaaccgccgcataacgaatttacccataaactctgcgctcgctgggaagaaattgcctgccgggcgcaaagtgacaaaacgcgagtgtgcctgctgcgtaccggtgtagtgctggcaccggatggcggtattctcggtaaaatgctgccgccgtttcgtcttggcctgggcgggccgattggctctggtcggcagtatctggcctggattcatattgatgatatggtcaacggtattctctggctgctggataacgagctgcgcgggccatttaatatggttagcccctacccggtacgcaatgaacaatttgcccatgcgctcggtcatgcgctgcatcgcccggccattttgcgcgtccccgcgaccgccattcgactgttaatgggcgaatctagtgtactggtattaggtggacaacgcgcgctgcctaaacggctggaagaagcgggttttgcgtttcgctggtacgatttagaagaggcgctggcggatgtcgttcgctgatgtggtttacagcaaacatccgccagttaactcccggtgttacaggattagtggctttgcgcgataagatcgtctggactaagtcgggtcaccatcataactaactctctgtctaaacctctatccagcatctcctgagcaatacgcagggcttcttcgtgtttgccctgcattgcgccttcttcacgtaatctgtcagcaatggtcatcagtttctccttttcttgtggtgcgcgttccgctatctcaccaataaatgcacgaaaacgctgggcatcccctgtttgtaatacgtaattaaacagggcttttagctgtctgtcattagtgttccctgtaactagcaggctaacaatttggtcgactaatcccaacagatcgcgctgacgaatatgtttctgaattaactccaacagcgccattttgcggtgttgcataatctcgtcatccggcaccacggtaatatccaccaacggaaaagcgctactatatattttgcgggctatagcaggctcggcaaattcatcaagccagcagagactataaggataaggacttctgcaaccatgataaaacagcatcgggagcaccaatggaagctctttatagcccgcatcaagatggttttgcattgccgcaatggaataacgcatcatgcgaaaagccattaattcttccggcttactttggtgctctatcactacataaatataacccactccctcctgcgttttcacagaccacaagaggtcggaataatattgccgcaggtcttcatcaataaaactgtttggttccagtttaagcgtcgttaaatcacacagtttgcgcagcggcgcgggaagatgaatatcaataaaatcccgcgcggtgtctggatggcgtaaaaaagatttaaataccgcatcatgcggcgtggaagttgtgcttattgtcatggcgttccgtcacccctcaaatttaagatgacgcgacaataaccacgattaacacccaatgcagcaggcagtttttatctttggacagcgaattcagaagtatttttagcggactgtaacttttacatttcagcggaagctgactcgcaaattccccatgaaaatactccggcagcgttagccaccggagaggaaattatttcaggcttcccttaaggaaccgttgcagacgagggctttgcgggttgccaaataactgctccggcgcgccctcttcttctattttcccctgatggaggaaaatgacatgagtagaaacatggcgagcaaagcccatttcgtgagtcactaccaccatggttttcccctcttctgccagttgctgcataatacgcaacacttcgcctaccagttcaggatcgagcgcgctggtaggttcatcaaacagtaaaacttccggttccatcgccagcgcccgcgcgatagaaacacgctgttgctgaccgccggaaagatgcaccggatatttcccctgcgcacgttcgtctatcccgacttttgccagatacttcaccgcccgctcgcgcgcttcctgcttgctcaggcccaacacctgaatcggcgcttccatgacgttttccagcaccgtcatatggctccagagattgaagtgctggaataccatcgtcaggcgtgtgcgcagtaagcgcagttgatttttatcggcgactttgagttgaccgtctttgtcgcgcaccagattgatcgtctggccattgaccacgatgctcccttcactcggtttttcgaggaagttaatgcagcgcagaaaggtacttttcccgcttccgctgcttccgatgatgcttattacatctccggcattcgcttgcagacttacccctttcagcacttcatgttcgccgtagcgtttgtgcaaatcgataacgtttaatttattctcggacatcgtattctcagtgcgtactagaaggtttcacatgctgcaaccagcgtttttccgctctgcgaaagaggctgatcaggacataagagatgattaaatagagcaccgcggcaatgccgaaggcggtaaaaggttgatacgtggcggcgttaatatcgcgggctattttcagcagatccggcaccgtggcagtaaatgccaacgcagtagagtgcagcatcaggatcacttcgttgctgtatgccggtaacgcaatacgcagcgcagaaggcaaaataatgcagcgatacattttaaaagtgctgaagccataggctctggcggcttcaatttccccatgcggaacgctacggattgccccagcaaaaatctcggtagtgtaagcgcaggtgttaagcgtcagcgccagcacggtacagttcaggccactgcggaagaaagcgttaaggaattcggttcccttaacaatctcaagcgtgtacatgccggaatagaacaccagcaactgaacatacagcggcgtaccgcgaaaaatataggtaaataaccagattggaaactggatgtatttattactggagacacgaccaatcgccagaaacagcgccaggactccgcctatcactacgctcaaaataagcagccacagagtgatcgccacaccagtaaagcgataaccgtcggtccacagcagcggtttccagtattcatgtaagatttcgatcacaggtcagccctcttcacacccacggagtagcggcgctcaaggaacagcagcacaccattggaaacagtggtgaaaaccaggtaaatcacgccacagacgatggcgaaatagaacggttcccaggtacttttgcctgccagttgggtggctttgaccacatcttccaggccgagtaagctaaccagtgcggtagatttgaggatcacctgccagttgttgccaatgcctggcagggcgtaacgcatcatgctcggaaacatgatccgccgaaacacttgcccacgagtaaaaccgaacgccgtcgccgcctctatatgtcctttcggcactgccataaaagcaccacggaacgtttcggtaaaataagcaccgtagataaaaccgagagtgataataccagcgaccatcggatcgatatcaatctgcccgacgcccatcgcctccgtcaccgtgtttagcgcaatctgcaaaccgtagaaaatcagcagcatcaacactaagtccggcacgccacgaatcagcgtggtgtacccttcgaaaatcagcccgctaagccgattttggctgagcttaccgccagcgccaattaaaccgatgattacagcgagcactacagagctgatagccagctccagcgtgacgagcgcaccctgtaaaataacaccactaaacccatacaacatgctgcctgtcctgtcgtgtgtggtgaattaccgcctcttgtctccctccggttacccgaagggagcgggctttctttcaccgatggcgattagccaccataaacatcaaaatcgaagtactttttcgctaatttctcgtaagtaccgtcagcgcgcatttcggcaaaggctttgttcagtgcttcgcgcagttcgttatcttctttacgcaggcccatgccggtccctacgccaaacagtttttcatctttaacagacgggccaccgaatttgtaatctttaccgacaggttgtttgaggaaaccttcgctggcagcgacctcatcctggaacgcggcatcaatacgtccggcagtcaggtcagaataaatgttgtcctgcccctgatagctgacgatttcaatgccttttggtgcccaatgttcattaccgaacgtctcctgggtggtgccctgcaatacgcctacccgtttgcctttcaggctctcgactgtcggctgaatgtcagaatttttcgccaccaccaaacgagaatcggcagcgtacagtttgtcggtgaaggctatttcttgctgacgtttttccgtaatggaaaggctactcatgatggcgtcaatcttcttcgcttttaaggacgggattaacgcatccagcggattttcgacaaacgtacattgcgtattgatgcgtttgcataattcctttgccagatcgatatcgaagccaaccagttcgccttgactatttttactttcaaatggcgcataggtcgggtcggtaccgatgcggatgttttgcggaatcgcagcaaacgccgcagttgcgctggagaaggccagaaccagagagaggcttagcaccagttttttcataatgtcctcaactgacagtctttttatagggaatatttacaggtttgttacacttatcgtgccataaaattgaccatcaaggcaaaatatcccgccccgttagacgtattatttttcattaaaaatgcttaagtatgcatttcaatgcaccacgatagtgcaacaaacctggcgtgcaccatgatgatcattccatcaggtacagcttcccagcgacgtatcagtcaccgtagacattaaagtcgaaatactttttcgccatcttgtcgtaggtgccgtcctgacgcagctcgccaagcgccttattgaaggcagccgtcagttcagcatcatctttacgtagccctacaccggtgccatcaccgaagtattttttgtcttttacactactgccagcaaaggcgaaatctttaccagcaggttgcttgaggaatccttcgctggcagcaacttcatcttgtaacgcagcatccagacgtcctgcagccagatcggaatagaccaaatcctggttggcataggccaccacatccacgcctttactacgccaggtctcgttagcgtaagcttcctgggtacttccctgcagcacaccaacatgtttacctttcagactatccagcgttggctgaatcggactacctttggccgcaatcaaacgagaatctgcggcgtacagcttgtcggagaaggcaatctcctgctgacgtttatcggtaatggaaaggctgctaataatagcgtcgatttttttcgctttcagactggggatcagcgcgtcaaagtcactggcaacccaggtacatttcacctgcatccgtttgcacatctcgttaccgagatcgatatcaaagccaacaaaatcacctttagcatctttgctactgaacggtgcgtaggtggtatcggttccgatacgtaccgtctccggtagcgccgcatagctggaagccgctgtggagagaccgactaacaaagacagagcgagaatgctcttcttcatacataaccctcaagtgaaaatggcttttttatgttgtgtattgtgttgtgtgtttgcaggctctttcatgcaggtcttatgccatcttgacgacaacagtaacattcaacgttaaatatgttaataagacgttgcattattgtcctgaagttgaagatagcaggtatagcggttgaatcgcagcgtttcgattgaatggcagaaacaaaatgtcgaggatttgatcgcggttgcaaaattgccctgaaacagggcaacagcggagttatgcgccctgccagcgggcaaagagatcttcaggaagggttatcgcaaactggtcaagaacacgattaaccgtctgatttatcacatcatcaagggattgcgggcgatgataaaacgccggaacgggaggcataatcaccgcaccgatttctgccgcctgagtcattaaacgcagatggcctaagtgcaatggtgtttcacgcacgcagagcaccaacgggcgacgctctttcagcaccacatctgccgcacgggtcagtaagccatcagtatagctatggacaatgccggaaagggttttgatactacagggtaaaatcaccatccccagcgtctggaaagaaccggaagagatgctggcggcaatatcgcgcgcatcgtgcgtgacatcggctaatgcctgcacttcgcgcagagaaaaatccgtttcgagggataaggtctggcgcgctgcctggctcatcaccagatgcgtttcgatatctgtgacatcgcgcagaacctgtaataagcgcacgccataaatcgcgccgctggcaccgctgatgcctacaatgagtcgtttcataaatagttgccctgtcagacttgcaggcagactttgcaggatttcggcgggagttgcaagtcagggtgccagaccggcaccctcagcgaaggcatcatccttcgttatgcatttcgagattttccacttcgttctgacgttgcactgctttggcgtcatcattacgtaacgtatcgaggaaatcgaggtagccctgatcaacatctttggtgacgtagacgccgttgaacacgctgcattcaaactgctggatatccggattttcagcgcgaacggcgtcgatcagatcgttcagatcctggaaaatcaacccgtcagcaccgatgatctggcgaatttcatcaacttcgcgaccgtgagcgatcagttccgtggcgctcggcatatcaataccataaacgttcgggaagcgaatttccggtgccgcagaagcgaggtacactttcttcgctccggcttcgcgtgccatctcgataatctgctcagaagtggtgccacggacgatggagtcgtcgaccagcaggacgtttttatcgcggaactcggcgcggttggcattcagtttacggcgcacggacttacgacgcagctgctggcccggcatgataaaggtgcggccaacatagcggtttttaacgaagccctggcggtacggtttgcccagaatacgagcaatttccagcgcgatatcacagctggtttctgggatcgggatcaccacgtcgatatccagatcttcccattcgcgggcaattttctcgcccagtttcgtgcccatattcacacgcgcgctgtaaacggaaattttgtcgataaagctgtccgggcgggcaaagtatacatactcaaacaggcacggattgctgaccggattgtcagcacattgacgggtaaacaactgcccttcttcagtgatgtaaatcgcttcgcccggcgcgacgtcacgcaggaaatcaaagcccagcgtatcgagcgctacgctttcggaagcgaccatatattctgtacggttctcgtcaatatcacgttttcccagtaccagcggacgaatcccgtttggatcgcggaaagcaaccataccgtggccgataatcatcgccacacaggcatacgcgccgcggattaagcggtttgtggcagcaatggcagcgaaaatattgtcggcttccagcgggtagtggcggaagttgtccagctcgctggcgaagatattaagcagaatttcgctgtcggaagtggtgttgatgtggcggcgtttttcttcaaacagttttttacgcaactcgtgagcgttggtcagattgccgttgtgggcaagcgtaatgccatacggggagttaacgtaaaacggctgcgcttcagaggcgctggagctgccagccgtggggtaacgcacatgaccaatgcccatattgccctgcaaacgctgcatatggcgagcttcaaatacatcgctcaccagcccgttcgctttacgcaaacggaagcagttattggcatctatggtgatgatgccggcggcatcctgaccgcgatgctgaagcaccgttaaggcatcataaatgctctggttaaccggcataacaccggcgataccgacaataccgcacatacgtctttttcctcgttaagccacatctcagagcacttacgctctgggcaagaaactactgctgctttgcagataatcaaaaaaacatctgatgataaaactgaattgcgggatcagctgacttttgctccagtcttcgcttttgctcaccccggtaaaggagtcgagaaagaagagaatggcagcaacaatcaacacaccgcgcaacgcaccgaaacagacgcccagcacccgatcggtgccactcaaccccgttttctccaccaactggcctatcacgaagttcacgatagcaccaacgatcagggtagcgataaacagtaccgcgatggcaatcccatttcgaaccagttcgtcttcaaagcccgtaaaccagacactcaggtaagtgtagtaatgactggcaacaaagaaagcacaaccccatgtcaccaggcttaacgcttcacgaacaaagccgcggatcaggctaaccagagaggaaaaagcaatcaccgcgattatggcgtaatcaatccagaccatatgtgtcccacgattttacgccctgtcatcctgttcggggcgcattctaacagaaaaagaaaacgtttgcgtagggatttccttcccgcgcatcaataaaaatggcgctgaaaaaatattcaacgccatcgactttttatgcctttgcggcatcgggcaatgcgtgtcggatgcggcgtaaacgccttatccgacctacggttctacccctgcgtaggcctgataagacgcgccagcgtcgcatcaggcaagaccgtattaattcggcgtatagcccattaccacgccacttaagccagaaagttgcttcaactcacccaggctacctttcagcttatctttgctggcatccggcccaaccagaatacgggtaattttaccctgcactggcgtggatgggctcgtataaacccgataaccggcaccgcgcagcttaccgacaatctcattcactttatcggcatttttcagcgcacccagttgcacaacataggctttacccgtcggtgcagctttttcttccacgaccggcttcggttctggcttcggcgcaggtggtgcttcaacctttggtttaggcggctccaccggtttcggcttcggtggggcgaccggtgcaggttccggttcaaactcggtgttattggctgcaatagtggccggatcgaggctcggtgctgcggcatcacctgcccgcacctcttccgctgcgccttccggcggctgcgtcggtaacgcctgggtggcggctggcatcatatcaggctcatcacgatcgcccgctttcggcaccagcgggatagccgcgaactcatcctgataatgttttttctgcccgtccagcagccctggaagtacaatcacccccagcgccaccagcacgatcgtgcccactaaccgattctgaaacttacttgccaccgcttctcctcgcgtcaatcacttccatgacatgtgcgaccgtgtggaaagaaccacacaccagcacggtgtcttccgctttagcgtccgccattgcggcatcccatgcctgcgcaacgctatcaaaacttttgccgttacccaaatgctcaagcagttgttctgccgtggcaccgcgcggcccttccagtggcgcacaataccagtcatcaaccacgcttttcaaccaggccagagttccggcaatatctttatcatgtagcataccgataaccgccagcacgcgcccgtttttcggtagcgctttcatacgcccggtgagatattccgccgcatgtggattatgcgcgacatcaaaaataacgcgtgggctctcgctcacaatctggaaacgtcccggcaaaattgcgctggcaatcccgtcgcgaatggcattttcactgacttccagcccgctggcacgcagtgccgccagcgctgttgcggcattcggttgcgggacaagcggcaacggcagattttccagcgtgccgtgagcatcgctaaacgcccagtcatgatcggtgacggaatagttccactcaacgccccgacgttgtaacagtgcacctttttcctgcgccacatcagcaatggtagaaggcatttccggctcaccgacaattgccggtttttcgctgcggaagatgcctgctttctcgcgaccaatactttcgcgatctggacccagccagtcggtatgatccagcgcaatactggttactaccgcgacatcggcgtcgacaatattggttgcgtccagacgaccgcccagccctacttccagaatcaccacgtcaagttgtgcctgcttgaacagccacaacgcgctcagcgtaccgtactcgaaataggtcagggaaatatcaccgcgtgcgctttcaatctccgcaaaagaggcggtgtgggcgctttccggcaattcctggccctgcacacgtacgcgctcggtataacgcaccagatgagggctactgtagacgcccactttgtaccctgccgccatcagaatgctctccagcgtacggcaggtggtgcctttgccattcgtacccgcaacggtaaacacaaatggcgctggtttcaggacgccaagacgcgccgcgaccaggctcacgcgctcaaggccgagatcgatagttttactgtgcaggttttccagataagaaagccagctagccagagggctcgcggcttgaggagtgcgtttgataatcatggtatccgctgattcgttacggtgagaatagcaaaagggcagagccagtggccctgcccttatcagttatcaggcctcaggttcctgatccggtaccgggggtaccactacgccttcacgcggcgcttcaggattcggcgctggcagattcatcaacttcgccagaatgctcgccagtttcaggcgcatttccggacgacggacgatcatgtcgatcgcgcctttctcgatcaggaattcactgcgctggaatccaggcggcagtttttcgcgaacggtctgttcgataacacgcggaccggcaaagccgattaacgctttcggttcagcgatgttgagatcgcccagcatggcgaaacttgcagaaacaccgcccatcgtcgggtcggtcagcacggagatgtacggcaagccgcgctcctgcatttttgccagtgccgcagaggttttcgccatctgcatcaggctcatcagtgcttcctgcatacgtgcgccaccagaggcggagaagcagatcagcgggcagttatcttccagcgcctgctcaacggcacgcacgaaacgtgcacccacaacagaccccatactaccgcccataaaggcgaactcgaatgccgcagcgacaaccggcattccatacagagtgcctttcatcaccaccagcgcatctttttcgccggtttctttctgcgcagatgccagacggtctttatacttcttggagtcacgaaacttcagcacatctttcggctcaagctcgctacccagctccacaaggcttccttcatctaacaggctatgcaggcgattacgcgctgtcatacgcatgtgatggtcacacttcggacagacctcaagattacgttccagctcagcgcggtataaaacctgaccgcagctatcacacttagtccacaccccttcaggaatgctcgccttgcgggtgggagtaatgttgcttttaattcgttcaatccagctcattagggacctttctgtctgaacctggttcgatgccagttttatctttggggacgcataatgccatttttgcccccaacagaccatgaatgttgcacattaaaacataacagcccgaaactttggataaaaaagtggtcgaaccgcggagttactttttattttgcggcgcgtgccgcagcgcgtttgtgacggattatttcgatgacgcccggcaaaatagaaaccacaataatcccgacgatcagcagcttaaggttatcctgaaccatcgggattgtaccgaagaaatagcctgcgtaggtaaaaagcagtacccacaacagtgcgccgatcacgttataagcggcgaaatgacggtagctcatgtggcccattcccgcaacaaacggggcgaacgttctgacgatcggcacaaaacgggcgagaataatcgttttgccgccatgtttctcataaaactgatgggttttgtcgagataactgcgacggaaaattttgctattgggattactgaacaacttttcaccgaacaaccgcccgatagtgtaattgaccgcgtcacccacaatcgcggcgatcagcatcagcaccaccatcatatggacgttgagatcgttggtttccagacttgccaacgctccggcaacaaacagcaaactatcacccggtaaaaacggcgttaccaccagaccggtttcacagaacaaaattaagaacaaaatggcataaacccagacgccgtactccgcgaccagctctgccagatgcacgtcaatgtgcaggataaaatcgatgaggaaataaatcaggtccatatttgcctatgccttgtactcgtcatctttcaggctgtaactacgttggctacagcctgaaatgttccgagcattattctcgttagtccgccagaaatagcgggcccattggcggttttggaagatcataccggtcagggtaatccaccgcgaccagatacagcccttccgcttttgccgttgctgccgccagcgttctgtcctttgccgccagcaactctgctatccagctctccggctggttgtgggcaccgacttccatcaggctgccgacaatattcctgaccatatgatgtacaaaagcattcgctttaatatctaccaccacataaggaccgtgacgcgtgacattaatatgcataacgttgcgccacggggttcgggactggcactgcaccgcacggaagctggtgaaatcattctcgcccagcaagcattgcgcagcccgatgcatccgttcagcgtccagcggttcgtaaaaatgggttacccctttactcagtaccgccgggcgcagccgatgattgtagatgatgtagcgataacggcgagccgtggcgctaaatcgggcatgaaaatcatcaggtacagttttaacccaacgcacagcgatgtcaccaggtaaattcgcatttacgcccaaggtccacgccgcgtctttgcgcagcgcggttgtttcgaaatgcacaacctgcccggtaccgtgtacccctgcgtcagtacgcccggcgcagaagacggtgatgggttcgttcgccacctgggagagcgccttttccagcttctcctgcacactgcggacttcgttctgccgttgccagccgtaatacttactgccgtcgtactcaatgcccagcgcaattttataaactggcggttgttgctggtcggacattagtacagatactcctgcaccagtttctcggcgatttttactgccatcagcgcgccgccaaagcgaacgttatcggccacgctccagaactggacttgctccggcataccgtagtcattacgcacgcagccaacagaaagatgcggcgtaccgctagcatcacctacctgagttgggaattcgttctcttcagagagcacaatatcttcgccttgaacaaacgcatcacgcgcttcttctgctgccagtggacgcagagcttcaaagttgaccatctgggcatgaccgtagaataccggtgcctggacgacgctagcgctaatcatcagcccttcgtcctgcaggattttgcgtacttcgtcaacgatacgacgttcttcacgcacgctaccttcgctatccggcagtaacggcagcatgttgaacgccagctgacgcccgaagaaatcttcttcgtcaatcggaatgccgttgagcaatttcgcactctgccccgctaacgcatcgaccgcttttttgccctgggcggaggcactaatcaggctggtaacgctgatacgacttaaaccgccctgatcgattaacggtttcagtgccgccagcagctggctggtcagactgtctggtacggcgatgacattccggttccggtaatctgtcagtacaaacgggtttacttccggcaccaccagcggtacgtcgggttcgagagcaaacaatccactgctgtcgatcaccaggcaaccactgttggtcgcttcttcaacccaggcagcggtagcttctttgcctgcgacaaaaaatgccagctgcgcctgcgtccagtcgaattcagcggcatcctgcacggtgattgtcttaccaccaaagcgcagttgttcgcctgcgctttcgttacgtgccagtgcataaatttccccaaccgggaactgacgttcagccagcgtttcaagcagggcttcgcccacagcgccagttgcgcccaggacggcaatgttccagccttcagacatggtggtttactccagaaatagcaaagctccctgccaatgttacagcagagagcatgaagaagagattaacgtgccggatgatgaacggcgttaaaacccagtttacacagcaaacttgccgcactggcgtcatcacaaattacatacagagaactccattcacggcgctcaagatagtttttgcgcagtttatcgaactcacccggtatcccggcgactttacgcagcggtgcgtcatcgcggcgcacatcatacaccaaatgcaccagccttttcagcgtcggttgatcgagcgggccatgcagcgtaatgcgaccaaactctggcgcaggcagtaatgtatccagcgcaacgtgctgttcatgcccaataaacttgctataagcttcaaacacttgcgtagtaccgcgtgctttaccttccagggtatagcctgcgatatggctcgtgccgatatccacttttttcagcagctcgacgttgagttccggttcgccttcccagacatccagcactacgcttaacttctggccttcattcaggcaggtcagcaacgcagtattatcgacgactgcgccacggcaggcgttaatcagaatcgctccgggcttcaggctacggatcagtttttcatccgccagatgtagcgttttgtacggaccatctttaaagagtggcgtatggaaagtcagaatatccgcgcgctggactaactcatccaggctgcggaaatcaccctcatccccacggtcggcgcgaggcggatcgcaaagtaaggttttaatccctaacgcttccagtcgcgcctgcaatcgacgtccaacgttaccaacgcccacgatccccaccgtacggtcgtacagactaaatccatcgcgttcggcaagcatcagcagggaggagaaaacatattccaccaccgcaatcgcattacagccaggtgcagcggaaaaaccaattcccgcctgcttcaaccatgcttcatcgacatggtcggtccccgcagtggcagtgccaacaaatttaatgggttttcctgccagcaaagattcattcactttcgtgacgctacgcaccatcagcgcatccgcgtctgccagttgagcgacggggattggacgcccgggaaccgcggtcacctcacccaaacggctaaataagtcgcgggcataaggcatattttcatcaacaaggattttcacgtttgtgttacctgtatgagacgagagttaaccggacaagtgtgccataatctcgcggccaggcatacttgcgaagatttcaggtataaggatacgtaatgatacaacctatttccggccctcctcctgggcaaccaccaggtcagggagataatctgccgtctggcacgggcaatcagcctttatccagtcagcaacgtactagcctggaaagcttaatgacgaaagtgaccagtctgacgcaacagcaaagagcagaactgtgggcgggtatcaggcacgatattggtctgagcggagatagtccgctgcttagccgtcacttccctgccgctgagcataatctggcgcaacgtctgctggccgcgcaaaaaagccattctgcccgccagcttttagcgcaattaggggagtatttacgtctggggaataatcgtcaggcggtcacggattatatccgtcataactttggtcagacgccgctgaatcagctcagtccggagcaattaaaaaccattctcaccctgttgcaggaagggaagatggttattccgcaaccacagcagcgcgaggcgaccgaccgtcctttattaccggcggagcacaatgcgctaaaacagctggtgaccaaacttgcggcggcaacgggggaacccagcaaacagatctggcaaagcatgctggaactttccggggtgaaagatggcgagttaattccagcgaaactgtttaaccatctggtgacctggctacaggcgcgtcagacgctaagccagcaaaatacgccgacgctggaaagtctacagatgacgctaaaacaacctttagatgccagtgaactggcggcgttaagcgcatatatccagcaaaaatatggtctttctgcgcaaagtagcctttcttctgcccaggccgaggatattcttaatcagctttatcaacggcgggttaaagggattgatccgcgtgttatgcaaccgctgcttaatccttttccaccgatgatggacacgttgcaaaatatggcaacgcgtcccgcgctgtggatactgttagtcgcgattatcctgatgctggtctggctggttcgttaaccccgacgaaaactcagtatcgtgacaataatacccagcaccgcagagatcgccccggcaagaaatacgctagagtaaccaaacgtggtcgccagcattcccgccagcggcccggagacgccgagggcgatatcctgaaacgcggcgtaaccgcccagtgcggtgccgcgaacttgactggggacgcgtttaaccacctccacgcccagcgcaggaaagataaggctacatccggctccggttaacgccgcgcccgctaatgcgacccatgcacctggggcttgccagagcagcaacaagcccaccgtttctacaagcagagagacaatcgccactttcacgccgccaaaacggtccggcatccagccaaacatgacgcgcatcacgacaaatgcgccgccaaacgcggtaagagtaaagcccgccatcgcccatcctttgctggcaaagtagaggctaacgaaagtcccgataacagcaaaaccaacgccttgtagtgccagacctaaccctggtttccagataagcccgacaacgctccacaggcttggacgttctcccgccagggccggtactttgcgcactgtgccgttacaggcccacgccagtacgggtaataccattgtggtgatcgccagtgcggcaaaaccgtaatggctatgaatcaacaggccaagcggagcaccaacagcgagggcaccgtaaatcgccattccgttccaactcatcactttgccagagtgttttggccctacgatgcctagtccccaggtcagagcgcctgtcagtaactggctttcaccaaagccaagaatcaaacgcccgacgaccaacagagcaaatttgaacggtgcggagacaggcaaaatcgccgccagcagcaacgcgccgccagccagaccacaagctaacattccctgaagcgcgctacgttttgcaccatattgatcggccagtcgcccggcgtaaccacgcgtcagcaccgtagccagaaactgaatcccgacggcaatgccgaccatggtattgccatagcccagttcatgatgaacaaacagcgggataaccggcaacggcaaccctacggtcatgtaggtgagaaaaaccgcaaaagcgatgcggaagaggctaaaattggcagaagatcgtgtttcggtttggcttacagcagtcatgcattactccagaatgcagcgcaaggcgaggagtatccccgtctcatctctctggtttcagggttacggtgcgttggcaggatttaacgcgtacgtcttttcagaaggaaatcgacaaagcgggaagtttgcctggaactggcggcgattgtcaatgatgtgaaaaagggaaccatcaggttcccttttgcgttagtgccggaggccgcattggcgcgtaacgtcggatgcgacgctggcgcgtctactccgacctactgcgaattaatctttcagcttgcgcattaccagcgtggcgttggtgccgccgaagccgaagctgttagacataacggtggtcagttcgcgatcggtcgtttcggtcacgatgttcagacccgcagcctgctcgtccagctcttcaatgttgatgctcggggcgataaagccgtgttccagcatcagcagagagtagatagcttcctgtacgccagcagcgcccagagagtgaccggtcatggctttggttgcagaaatcgccgggctcttatcgccgaacacttcacggatagctgccagctctttcacgtcgccaaccggagtgctagtaccgtgggagttcaggtaatcgattggggtatcaacgccatgcatcgccatcttcatgcagcgtactgcgccttcgccagacggagcaaccatgtctgcaccatcagaggttgcgccgtagccaacgatttcagcatagatgtgagcaccacgcgccagcgcgtgttccagctcttcaaccactaccataccgccgccgccagcgataacgaaaccgtcacggtgagcgtcgtaagtacgggaggctttttccggggtgtcgttgtatttagtagacagcgcacccattgcgtcgaattcgcaagccatttcccagcacagctcttcgccgccgccagcaaacacgatgtcctgtttgcccagttggatctgctctactgcgttaccgatacagtgtgcggaagtcgcacacgcggagctgatggagtagttaacgccatgaattttaaacggggtggcgaggcaggcagaaacgccggatgccatcgctttggtgaccacatacgggccaaccgctttcaggccgcgcgggccgcgcattgcgtcagcgccgaacacctggaaacgcggggagccgccgccggaacctgcaatcaggccaacgcgcgggttattctggtaagcttccggagagaggcccgcatcagcgattgcctgctccatagaaaggaatgcataaatggatgcgtcgctcataaagcgcacaactttgcggtcaatgaggccagtggtatccagttttacgttgccccagacgtggctacgcatgccggaatccttcagctcctgagagaaagtgatcccactacgtccttcacgcagagatgccaggacttcctgctggttattaccgatgctggaaacaatgcccaggccagtaatcactgcacgtttcattcaatacctctgtaagtcgcacatagagtaagtttcgaatgcacaatagcgtacacttgtacgccgaacaagtccgatcagccatttaatagagaaatttgcgcagccttacacacatcgctaagatcgagccaccgcctgtaagacgagtaacttacgtgaaacactactccatacaacctgccaacctcgaatttaatgctgagggtacacctgtttcccgagattttgacgatgtctatttttccaacgataacgggctggaagagacgcgttatgtttttctgggaggcaaccaattagaggtacgctttcctgagcatccacatcctctgtttgtggtagcagagagcggcttcggcaccggattaaacttcctgacgctatggcaggcatttgatcagtttcgcgaagcgcatccgcaagcgcaattacaacgcttacatttcattagttttgagaaatttcccctcacccgtgcggatttagccttagcgcatcaacactggccggaactggctccgtgggcagaacaacttcaggcgcagtggccaatgcccttgcccggttgccatcgtttattgctcgatgaaggccgcgtgacgctggatttatggtttggcgatattaacgaactgaccagccaactggacgatagcctaaatcaaaaagtagatgcctggtttctggacggctttgcgccagcgaaaaacccggatatgtggacgcaaaatctgtttaacgccatggcaaggttggcgcgtccgggcggcacgctggcgacatttacgtctgccggttttgtccgccgcggtttgcaggacgccggattcacgatgcaaaaacgtaagggctttgggcgcaaacgggaaatgctttgcggggtgatggaacagacattaccgctcccctgctccgcgccgtggtttaaccgcacgggcagcagcaaacgggaagcggcgattatcggcggtggtattgccagcgcgttgttgagcctggcgctattacggcgcggctggcaggtaacgctttattgcgcggatgaggcccccgcactgggtgcttccggcaatcgccagggggcgctgtatccgttattaagcaaacacgatgaggcgctaaaccgctttttctctaatgcgtttacttttgctcgtcggttttacgaccaattacccgttaaatttgatcatgactggtgcggcgtcacgcagttaggctgggatgagaaaagccagcataaaatcgcacagatgttgagtatggatttacccgcagaactggctgtagccgttgaggcaaatgcggttgaacaaattacgggcgttgcgacaaattgcagcggcattacttatccgcaaggtggttggctgtgcccagcagaactgacccgtaatgtgctggaactggcgcaacagcagggtttgcagatttattatcaatatcagttacagaatttatcccgtaaggatgactgttggttgttgaattttgcaggagatcagcaagcaacacacagcgtagtggtactggcgaacgggcatcaaatcagccgattcagccaaacgagcactctcccggtgtatagcgttgccgggcaggtcagccatattccgacaacgccggaattggcagagctgaagcaggtgctgtgctatgacggttatctcacgccacaaaatccggcgaatcaacatcattgtattggtgccagttatcatcgcggcagcgaagatacggcgtacagtgaggacgatcagcagcagaatcgccagcggttgattgattgtttcccgcaggcacagtgggcaaaagaggttgatgtcagtgataaagaggcgcgctgcggtgtgcgttgtgccacccgcgatcatctgccaatggtaggcaatgttcccgattatgaggcaacactcgtggaatatgcgagcttggcggagcagaaagatgaggcggtaagcgcgccggtttttgacgatctctttatgtttgcggctttaggttctcgcggtttgtgttctgccccgctgtgtgccgagattctggcggcgcagatgagcgacgaaccgattccgatggatgccagtacgctggcggcgttaaacccgaatcggttatgggtgcggaaattgttgaagggtaaagcggttaaggcggggtaatctgctctcgcagtgtttgccggatgcggcgtgaacgccttatccgacctacgtgtgacgtgtaggcctgataagacgcgataagcgtcgcatcaggcatgctgctccagacgccgcaacttactgctgactcgcctgctgaaacaggttttcccacatatcggtcaccagcgcctggtcacgcgggctcaattcaccagcaccaatggctttttccagactctggctaacggtcgtatgcaccgcctgagcggagtggtcatcaccactttccagttctgcgatggctaatgtcaggtggccacgcaaatacccactggcaaacaactcatcatcactggcatggtcaaccataccgtcgattaatgccagaatgcgactttcaaactccgcgatcatcttctttcctcattgtaaaacgtggcgctggcttcagttgagcgcttccggccacgggaactgttccgccgtaagttccggcgtgtgataataattttgtagtgctttaatgaagcgtgccggacgttccggaatgccatttgtcagataatccatcacctgcgcatgtactcgccgttgaaacaccacacgatccggttcgaaatccccttccagattgtcgcaactgacgttaaacggatatcccgccgccacacagaacaaccagtcgagcgcctgcggcttcacttcaacatcttcaaactggctttgcgtttgggcatcgcgtccgtccgggcaataccagtagccgaaatcaaccagctcacggcgcgctttcccggcaatacaccagtggctaatctcatgaattgcgctggcataaaagccatgagcaaagacgattcggttatacggtacttccgcatcagcaggaagatagatcggttcgtcgtcgcctttaatcagacgggtattaaaatcatcggcaaagcagctattaaaaatttcaatcaactgctcgtagtggtgtgtactgttcattagttcatccccaaccagtggaggatctcctgtccgtggctgtcgtaaagtaatttggcactcatcaccgcgctgacgataacaatcatcgggcggatcagcttttgtcctttgctcaacaccagtcgactacccatgcgcgcgccgaggaactgccccaccagcatgacaaagcccgtcgcccaaatcactttgccgccgagaataaacagcagtaaaccgccgatgttactcgttgcgttgagtaatttggcgtgagccgtggctttggcgaggttaaatccgcacagcgtaacgaaggccagcgcgtaaaagctcccggcagccgggccaaagaatccatcataaaaaccgacgcagccaccggctattaacgcgaagggtaaaccgtacatccggcgctggcggtcttcttcacctagctttggcatcagcaagaaatagaggccgatacaaattaccagaatgggcaaaatctgccgtaagacatcagcctgaacgtattgcaccagcagtgcgccgctcatactgccgacaaaggtcatggcgatattgagtttctgatcgcttaaactaaccactttgcggcgaataaagtagatagtagcggaaatagagccgccgcaggcttgcagtttattggttgccagcgcattagcgggagacatccccgctgccatcaatgccggaatggtgagtaacccaccgccaccggcaatgctgtcgataaatcccgccagcatggcgacaaaaaagagaactcccagcaacagcggggaaaccataaacaggctattaaacgtttccattagatcacgtgctcatccagtagcgcctggcaggaaggcggcaacggaggcggtgtcttcttctcaggctttgttgttcccggttttggaggttcaaaccagctttgcagttctgccccgcaaccatcgccacttggcggtaaaggttgatcttcacactccagactatcggcagggcaacgtaatcgtacatgcatatgcgcgcgatgctggaaccagggtcgcactttgcgcaaccagtcgcgatcggtgcccgcatcaaggcaaagttgttgtttaatcgccggattaacaaaaatgcgcgtgacgtctttgtcctgggcggcgagtttgatcaagctgaaaatttctggcttccacagcgtggagacaacgtgtttaccgtcgcgggaaactaagtccagtgcttgcgggcgcaagagctgcgcggaggtccagcgagttttcggcagttgcagaaagatatcgacatccagtccggtctggtggctggcatgaccgccgttgaaacgcccaccagcgggcatccccatatcgccaatcagcaccgtacccatgcccagattgctcacctggctactcagacgctggataaacatcaccagatccgggtgaccgaaatagcgacgctgatcggtacgcatgacctgataatgttcggactgtatcggcagcgtgtcagcgccgacaatacagccattagaaaaactgcctatgctttgtgcgctacccggcacaggttgggttattttttgccacggcgtcgctgccaggctggcgctactggcaagcagagccagcagcgcaatcgcggttttattcattttttaccagcgtggaatatcagtcttcacatcggcattttgcgcccgttgccgtaacaggtgatccattaaaacgatcgccagcatcgcttctgcgatcggcactgcgcggatcccgacacagggatcgtgacggcctttggtgatcatctcaacttcttcgccaaagcggttaatggtacgacccggcacggtaatgctggaggtcggtttcagcgccatatgggcaatgatttgctgcccgctgctgataccgccgagaatgccgcccgcatggttgctctggaaaccgtctttggtgatttcatcgcggttctggctgccgcgcagcgccaccacgtcaaagccgtcgccaatttccacgcctttcaccgcgttgatgctcatcagcgcatgggcgatgtcagcatccaggcggtcaaagaccggctcgccaagtccggcaggaacgccactggcaacaacggtgactttagcgccgatggagtcgccctcttttttcagcgcacgcatcaactcgtctaacgcgtcgattttgtcggggtccgggcaaaaaaacggattttgctcgacctggctccagtctttgatatccagcggaatgtcgcccatctgggtcaggcagccacggatttcaataccaaatttctcggcgagatattttttggcaatagctcctgccgccacgcgcatggcggtttcgcgggcggaagaacgtccaccgccgcgataatcgcgcagaccgtatttttgttcgtaggtgtaatcggcatggcctggacggaaaacgtccttaatcgcactgtaatcctgagagcgctggtcagtgttttcgatcaacaagccaatgctggtgccggtagtaacgccttcaaaaacaccggagagaattttgacctgatccggctcgcggcgctgggtggtatagcggcttgtcccagggcgacgacggtcgaggtcatgttgcaggtccgcttccgtcagcggaatgcctggcggaacaccatcgacgatgcagccgagcgccagcccgtggctttcgccgaaggtggttacgcgaaagagttgtccaattgtgtttccagccatcacggctccgttattgttgtgtttgcgtgtttacttaatctttataaatcgcgaaatgttctcgtgcggcaataagctgctctttggtgagcataaacacaccatcgccgccgttatcaaactccagccaggtgaacggaacatccggatattgttccataagatgtaccatgctgttgccgacttcacaaatcaacacgccatcatcagcaaggtaatctgccgcgttaccgagaatgcgacgcgtcagtttcaggccgtcagtgccagatgccaggcccagttccggctcgtggcggtattcgtttggcaggtcggacatatcttccgcatcgacatacggcgggttagtgacaatcaggtcgtactgcactttcggcaagtcgcggaacagatcggaacgaatcggaatgacgttgtggatcagaccgtgttcttcgatgttctgttcagcaaccgccagcgcgtctggagagatatccaccgcgtcgacttctgcatccgggaaggcataagcacaggcaatggcgatgcagccgctaccagtacacatatctaaaatatgctgcggttgcttgctgataagtccggcaaatttattgttgatcagttcaccaatcgggctgcgcggcaccagcacgcgttcatcgacgtaaaattcatggccgcagaaccacgctttgttggtcaggtaagccaccggaatgcgttcattgacgcggcggatcacgcgttcaacaatacggtgtttttcgctggaggtcagacgcgcggtgcgcatatcttccggaatatccagcggcaggtagaggctaggcaacaccagctgtacggcttcatcccacgggttatcggtaccgtgaccgtaccagatatttgccgcgctgaagcggctcacgctccagcgcaacatgtcctgaatggtttgcagctcatttactgcttcatcaacgaaaattttatccacgtattcctccagggcatgatcgcaataatttcggcggctagtttgccatgaagatgacgataaatcagcattcacgcgcggtgagtgaggaaaaatacgtttaaaacgatcgattgcgctacgagtcgggtaaactgtaggaaaattagaaatagagacagataaatgaaaaagaaaacaacacttagcgaggaggaccaggctctgtttcgccagttgatggcggggactcgcaagattaagcaggacacgattgtccaccgaccgcagcgtaaaaaaatcagcgaagtgccggtgaaacgcttgatccaggagcaggctgatgccagccattatttctccgatgagtttcagccgttattaaataccgaaggtccggtgaaatatgttcgcccggatgtcagccattttgaggcgaagaaactgcgccgtggcgattatagcccggagttgtttttggatttacacggtctgacgcagctgcaggccaagcaggaactgggggcgttgattgccgcctgccgccgtgaacatgtgttttgcgcctgcgtgatgcatgggcacgggaagcatattttgaagcaacaaacaccgctgtggctggcacaacatccgcatgtgatggcctttcatcaggcaccaaaagagtatggcggtgatgcggcgttgttggtgttgattgaagtcgaagagtggctgccgccggagttgccctgaggagttgagcgcgttgcgccaggtacgggtaatggcaggggcgaatgcccctgcctggtgtatctaagggttacaactcattcagtatgtactggaaccggcaagtagaatcgattggctgcatactgctggtatcaacacgcacgaccatatcgtgtaactgtttgtccgttatagggtgtcgatttggcgtgacgctgacttccgccttgtcacatccgctcgcggtaaaagttatcatctgtgcaacccagcggcagtaaccacctgtttcattcatctgcgtactgtcgcacaacttcccatctttcatcaaatacgtactaagcgttttctcaaccacaccgcccgtgctctgcagggtgagcagtttactcttactgacataattctcattccaactaacgtcataaggttgaacagaaacggatggacaaatcgtgtcgtgactatcaggcccctgatacgtcacgccccctggagaggcttcagagtcattcataataaccaaccatggacaagaaaagtaagattcaatctctgcagagacaataacctcaaatgtataatacccgcagttccacccagacggtaatccaggacaacttgctttgttgatattttgatggtagccaatcagcttaacgctaggggcaggaggaggaccactccagctcacattttgcaatatttccccagtcatgagccattgactacttttatattcaccaacgtacactgcggatggcatcattatttttaaattaaaagtcgcaatattacggctatcaccgttgtaaccgtagtaaacgtcaacgctatgcccggcagccatagcttctgtagtagcaataagcatgaccagagcgaacaaccatcgtagtattttcattttaaatatactcaaatgtcgcagttaaagaggcggtaaattcaccgatcgtcacatcacggccgcttttcgcctgtagccaggctctgaaattgatatcgttattgccattggttagcgcaaaggtcgccccatttgtattgttgatggcaacctgcattccgtcggttttttccatgccaattcccactccctgagcggtactactcgtatccagtgccagaaaaccgggttgttcgctgtcttctacccccgtgagcgtgacttttacgttgtatcccgccggccctttgcaatctttcagcttaaagactacgggtacacgagcggactggcctgcaacgttcaaatcctgacgactgaccgtgggaaagcgcacctctgccagatattggccatccaccaccagcgcacaggatttacttaataaattaccggagaaatgcagattattatctgccgcgaataacgtgctactcattgccaatatcagccccgctaacaggacgtaaccaccggactgaatcatacttttattcattgataatccacccgtaatgttgcgtaagcgctaaaattcgtatcgcttaacacagcatcactcgcttttaccggtacggcctccagcttcggcttttgcgtaaaatcagtggcgttgatagcaagcggagtattgagtttaaaacgctgaccatcgtgctgaagctcgataccaaaaccgggtacatcagtttcaattgctgcatcattaaaactggtttgtgtaccagtccaggtgagggtcatctcccaatctggatgacgggtcgtgctgtcacaagtgagttcatatggcacctctttacgaccatagttgccgttgatgtcgtcgataatgagatcgcgaaattcgacttcaatggttttaccaccgctgatgctacaggttggcggactcaataatgtcccgtgaaaggtgatgtcttcatcagcagcatgagctatggcgctactgacacaaagcagggttaagaaagtctttctcattgatagtccaccaccatggtcaaactggcgttaaactcgcccgcagcaagttgcgccccgcttgccttcacaggtacagccttcaactgtggctggttattgatattaaatggcgtccagctattttcaccgacggcaaacaaactgttatcggcgctattttctatccgaatgcccagcccggtgatattggtactgagtaccgtttcgccgttaatcgtactggtattgcccttaagttgcatccgcaagtcgttagcaagactgtttgtgcagttcaacgtgtatttcgcatcttgccgataattggtgccatcaacgttatcagcaatcatattgccgaactctacctggctgcccttgatactacagggtggcggagcatcgaccaacacgcgcagaattaaatccacgggtttactaccagccatagcagataaactacagacactgcataccagcagccctgcgcccactacaaacttttgactcataactccccccgtcatcagcctttgcggctctgctcttcatccacctggcagctgttgccattgcactggaagaacagcggcatccgtgcgccaaagtcgttgacgtaagtcagcaccggtacgctatccattttcacattcagcggtaccgtggttttcggctcaatgaccagagggctgaaccctgcagctggattaccgtttttctgcgcactggcgttgctgataatcacgtagtacggcgttgggttattgacggtaaatgcctgaccgctgcgggtgagcgtcaccttgtgctgccacggacttttcatactgaccttttccagcgcctttggtcgccagaacaacttgatacgcgtttgcagcgcgatttgcagggtattgggtttgttactttttggcgggatctcgcgcacgttaaagtagaacatgctttcacgatcggctggcaatttgttgatatccggcattccctgcacttttacctgcccgttcatcatactatcgatgcgttgcactggcggcagcacagttaacgggctggtgatcttgttacccttttcatcttcaatccagctttgagccagataagggagtttcggatcgttattacgcagcgtcacgctgatacttttgtcgctttcattaaatatcaaacgggtacgatctggcgttacagacgccagggcagacaaactggtagcgctaagcagtaacgccagcgtcatagcacccaatttggcagagcaaagtaaatcagacatggatcattccttaatcacgttattggttagcactaacagaaacagggggatcggtgggtgtcacctgttgcgtctgctcctgaatgacaggctttatgtcatcaggaacaaccggcgcgacgttgcctttatgctggcatggcagtaacaagccgttaaacagatcggcaggcagcgggtccggcaggttgatatcgcaatgcgcaacaccactccagaacacactcatatgttcgccaggtttcaccccagccagatagacactaccgtcatcatcgacaaggcccactgtctgctcgttatcattttttacttctgcgccaaacggtggatggctgccatcttgtaaacgcagcaccgccatcgctttttgaccactgatgacggcaaatttgcggtagccaatggctccttcagttagcgtggcttgcaccacgctctgggttgcttcggcgttttccggcaatttgttgaggtcgatatacgcctgattgcgataataattgttaacgtcagaaacgacggctttaccaaacatattggtataaacagcagccccgttaccttccaccggaacatcggcaacgccatcggcatcaatcagcaggcgtgtcccgcccatattctgggtacggtgaagtgcgccgccgtgggtagtaagcgttgcgccgccctgtaagctcaagcccgcagaggtgtattgcccttcatggtagttcgcactgaggtcaacctgcgccaggctaccatcatggctgtagtagccatcaacgctggtgtgtttgtcactggtgccgatgttcaactgatagtgagtcgcgtcatcgacacggctaaaataaccgacctggctgctgtccgtcccactgccatagttgccgttatagctaacggtactgttgtcgccccacggcatactgagcgaaatttacatgcccttatccgcccggttgtcatactcgtagcggtagccagtcagggaaacgctcatattacgaatgctgcccatattgaaatagtgggagagcatgatgttgtagtttgtctgctcctcacgatcccagtaggtatggcgggtatagttgagataaacgctaacacccgcatcgcggaagttctggttataagtggcggtgtacatctctttgtcgttgcccgtacggaccatttcgctgtcactggcatccagatactcgctcatggtcataaagttctcttcgctgaagcgatatccagcgaaagtgacgcggctgttgagctggtcaaagtctttggaataactcacacggaaggagttaccgtccaggctacctttgccataagcggtgtctttatccagtttggtatggctatgagtaacatcaaacgcgaccgcgccgaaggtagacaaatcgcgaccgacgcccagcgccgcagactgatagttttcatcacccagcgcaccgccatataagctccagccgttagcgatgccccaggaggcttcagcaccagagaaaaatcccccctcgacatggtggccccactcttgcggacgtcccatcatgatcttatagcgaacctggcctgggcgagtgaggtatggcatgctggcggtgctgatgtcatattcctgcacctggccgttctgttcttcaatgcgaatatgcaacgtaccggagacggaatcaccaagatcctgaatacgaaacggtccagccggaacctgcgtttcgtaaatcacacgccccatctggctgacggtcacttttgctgtggtgtgtgccacgccggaaatgtctggcgcgtagccgcgcagattgggaggcaacatttgatcgtcagtgctgacactgccaccaacataattaaaaccgtcgaaaatatcggaattgaggtaatcttcgcccagcgccagtttggcttttaaactcggtaacgcccgccaggcataatagcgactccactcccattttttttgtgtgtcatcgccgccaaattcatcgtcatcatcattactgcgcgtatgttgatagttggtctgccagtcagcgcgcatacgccatggccccaggttaaccccgaccgtcccgttgccgctgatctcgttactgtcatcgccgccattttcttcgtgtcgtgtttgcgcagtgatgctgtagtccgcaatgatcccggagatgccatcatcccaacgagaaggtggatcccagtcgggccaggtatattcgaggtaagcctgcggtagactaatgactaatgcggactggcttaaatcagccttaatttccacgccttccagttgaccgggcttcaggcatttaccatcgtggctccattgcagatttttcgccacgtcttcttttaaaccaaactgcgccaccagttccggtgtcagacaagcatagcttttgctaacgtcatcttcaccagcataccagtaaatatcgtactcttccgccaatggctgtttatttagttgaacctgtaaattgtattttccgggctcaacatacccctggctggaaaaacgcttcagatcaatttttgtgtcgccttttaattccagaaaacgggaatcaaactgaatgtcgtcttcagcccagacactgctataactcccactcattgccagcgcaatgcaccacggaagaatccgtaatcgaaaaagagaatggtcaggcatacacgtttttatccgtttttattcttgttcggtcaaaatccatttaaataccccatagcagtgtcgctatgggggtatgccttacaggtaagtaatctggaaggtggtatttgcttcgaaattacccagatctggcgcatcagctgcgccgaccagccaggctttaaagttcagagtctgcttcgctttgcctttattagtggcagtatctttcacgattttctggtcaatacccatgccgcttttgtaagaggtacccagagagtcaccgatcgccaggctaacattgttaaatgccgcaccggtatcggtattgaaaatggtgtaataattgccgctatttgcagaagaaacggtaccagtaaaggtagtggtcattgtttcctgagtatcaaatacgcaatcttgcaggcgaatctggaaatttttcggcgtggtggtgccgttatttttcagtttttcggcaccgatatcacccatatcaacttccagtttgtgatcgtccggaacgatagaacacacactgtcttcaatggtgccgtaaaaacgtgcagtaccgttgttacccgcagcgattgttgccgtagaggtgaacgcgcccatcaccattgccgcagcaatagctgttttaacaaacttactcattatttgtccttaaactataaataattaaaatataaacattgcaatacattgattcagtcaatagccaatgtttatacccagccattgaatacggcatgcgatccaaaaaaacaggtcgtaaaaaatgtattcgttggtgtggggtcgaatagtgatgttttcactcccctgattcaatttaattttactaatgagtaaatgtagatttaattaatatattgataggggaaagattatcttaaggatcttctaaaaaaacacgaaatatatatttagaaaaaacaggaagcatatcaacaatgaatgccaatagcttaaaaaacaaacaatgaacatataatgcgattggcattaacccgcttttgtcgatataatatataaacactatagccagaatttaatcaagtttcaattacgtcctgcctgattattcaactctattttctccattatctgtattaataaatgataatgagtgtcaaacagacattattcatttcaacatgtaactttgggcaaaatcaagatacgcgcagaagaatactttccgaatgaaagttaaaggtgttttatttatagatggggagagtcttcgatagtagtgaggttgacagatatccgctgcctgatgagcaattatgcccaatgaatctacctcattgggcataatttggaactcatcagatagcttttgccatcttcagattacacgggctcatctgccagttgaatgtgccgtttccgctttcatcaagcgttacgctggcaatggcgctggtggtaaacataggcggcgtttcgcccggacataactcggcaaccagatacccgactaacggtaagtgagagatcaccagtacgctagcaacaccttcattggtcaacgcctgcaaataggcactgaccagaccaacatcgccgcagggcgttaactccggcagaacttctgcactggaaggcaggttcagacaatcccctacttcttccagtgtttgctcggctcgcaggaacgggctcaccagaacgcgttcgatttccactttttgacctttcagccagttcgccatcaggcgagattcgtcacaaccattagtggtcagaggacgaacggaatcactggcggcatcgagggctgcgtcgccgtgacgcatgataaaaacttgcatattgcaccgcttttgttaaccagattcgcccgttttctttcatctgaaaccagagaaagaaaacggtggccggcattgtgccttatccattcaccgaatgaaacgctgttttttacctcaatggcgtaagtatagtcaatatgcgtttacattttgaccaacactccgccattcagcgcggattcatatagctttgaccttcttattgcaggtcagttgcagttgttttccaaaaactttccccacgcgcgcccatctcgaccaaacgctcgcaaggggtaaaacgggaaccatactgcgtggcaagtcgttgcattattgcaaccacttcgcccgcgccgagagaatcgatatagcggaacggtccaccgagaaatggcggaaaaccaatgccaaataccgcgccaatatccccgtcacgcacgctacggataacctgctcatcaacacaacgtactgcttcattcagcatcaacatcacacaccgttcagcaacctgcggtgcggagattcgcccctgcccttgtgtgccaatcagcgggtaaatggcgggatcgacctgttttttgcttttacgccctttctgaccataaagatagaaaccccggccattttttctgcctttgcgatcgtcgttcaaaatactagaaacaacatttgcaggcgcgctaaaacgttctccataagcggcttccagtacaggaataattttagtcccggtgtcgattcctacctcatccaaaagttggattgggcctaccggaaaaccaaatttcactagcgcggcatcaatgtgctctacccgttcaccttgggtcaacatgcggatagcttcattaatgtaaggcgctaagatgcgattgacgtaaaaaccggctttgtcacgcacgacaattggcgttttaccctgttttttcgccagttttactgtggtagcgatggtttgcgcgcttgtccccgcatgaggaataatctccaccagcggcattttttccaccggactgaagaaatgcaggccgataacttgctcaggtcgcgtggcgtgagcggcgatatcaccaatcggtaaagaactcgtattgctagcaaagatggtatgagcggcgcaattttgctcaacttccgccaccatctgttgtttcaattcgagattttcaaacaccgcttcaataatcagatcgcgatgggcaaagccgcgatagtccgtcgttccggagattaatgccagctgtttgtcacgttcgctggctttgagatgacgacggcgaactttgccctccagctgatcccaactgtacttcagcgcatgatttatgccctgcgggttgatatctttaattctgaccggaatccccgctttacaagcagtgacataagcaataccgccgcccatcaagccaccacctaaaatccccacgctgtttaatggcgcaggcggcgcatcactgccgggatctttcttcacgtccgtactggcaaaaaagatactacgcagcgcctggctttgtggcgtcatcgccagttcgccaaacgcccgagcttcggcgtcataaccgctgctggtgccctgcgctaatcccgtttcaacaacctccaggatgcgttctgtcgccggataattgccttgagttttgtgttctgttttcttgccgaccattttgaacagcagcgcacgacctaacggccccgccagaatacgctcgcgtacaggtagagggcgggaagatgggcgctccttctttgccagctcaacagcggcttccagcagaatggagtgcggaacaacgtcatccaccagccccagctttaatgcctgtttcgcccgaagttgttttccggtgaggatcatctctaatgctgtgctgacgcctatcagacgcggtaaacgctgggtgccgccactaccgggtaacaatccaagttgtacttcaggcaaaccgagcaccgttttaggatcgtcagtacaaacgcgaccgtggcacgccagcgccaactccagcccaccacccaggcaagcgccatgaatagccgcgataacctgaatgggcaaagcatgaatctccgccatcaactgttggccctgccgcgccagagcttccgcttcttgcgccgttttgcagttgccgatcatgttgatgtctgcgccagcaatgaagttgtccggtttagcggagacaaacaccacgcctcgcaactctttgttttcacggagttgcttaataatggcgcgcacctggctggcaaactccgccttcagggtattcattttctcacccggtacgtcgatggtgataacggcaatgttgtccagacgaacattaagggtaaacgcacttgtcatttccattattccgcctccagaaccattgccgcgccaagcccaccggcagcacaggcggtaactaaaccaaatccaccgccgcgacggcgaagttcatgcaatgtctgggtaatcatccgcgcgccggtcgccgcgaagggatgcccgtaagcaatgctaccgccaagcacgttaaatttgctatcgtccacttcgccagtggcatgtgcacgccccagtgcttcacgagcaaaacgttcactacccagcaactgaatattcgccagcgtctgagctgcaaaggcttcgtgcatatcgatcaatgtcagatcgctcatcgtcaaaccggcacgctccagcgccagcggtgtactccaggctggaccgagcaacatgtcctgccagacatcaatcgcagtaaatgcgtagctgcgcagataccccagcggcaccagccctaattctttcgcccgggattcagtcatcaggatcaccgctgccgcgccatcggtcagcggcgtactgtttgccgccgttaccgttccgtgtttgcgatcaaacgccgggcgcagctttgcgtaatcggcaaggctggaattaccgcgaatattgttgtcttcgacaagcggttgtttataaggagggataaaggcagtcatcacctcttctttgagttttccgtcactccatgcctgagcggcacgctgatggctacggtgcgctaatgcatcttgctgttctcgggtgatgccgtaggttttcgccatttgctctgcggtgtcgcccatccgcaagccggtagaatattctgctaccgcaggtggtacgggcattaagtcgcgcaaacgcaggcgagagaagagtttcagtcgctggctcatggtacgagctttgttgacatcaaccagcacgcgcgccagttttttactgacgccaattggcaatacgctagaggaatctgccccaccggcaatccccgctcgaatagttcccgccatcaggctttctgcgacgtttgcaactgcctggaaactggtagcgcaagcgcggctgacgctgtaagcatcggtatgtacattcattcccgtaccgagaacaatttcacgcgcaatgttgggggcttcaggcatttgtacgacctgaccaaagaccagttgttcaatcacttcggcggggatctcgctgcgtgccagcagttcgcctaccaccatcttccctaaatcaaccgcgggaatgccatgaaaagccgtcgcctgacgggcaaaaggcgtacgtaaaccgctaacaatggcgatacgatcgccctggcgggtaaccagcggtaaaacctgacccataacactcccctgtaaaaaaataaataaagtggtctgacctgatcatagtcttaaccatttttttacatttagccaagtggagaaaagggaaagtgggagctatgacacagagagaaaagaagaagagaaaagaaaacgcccctgccagcaactgacaggggcgtacgtacccgagaggaattaacgcagacccagctggaaaatcagcatttcagcttcgcaggcaaaagtgaaatcgatatccaggcgcacaccgtcagactcttcagtgaaagtcggggtgattttgcaaggttcagattccacgctacgggctttttcagtcagcgccgccagcgtttgctctgcttctgcgcggtttgcaaacacgcggctgtaagacgcggtgcagtcggagttgtccataatggtgccaacatccatacagcagcaaaccggggtttcatcagcactacatttactcatcgttgatttcctctgtatgtgcacccaaggtgccagataaacgttgtggatattttacgcttccggaaagtgctgctccagttgttaattctgcaaaatcggataagtgaccgaaatcacacttaaaaatgatctaaaacaaaattcacccgaatccatgagtgcgccacctccaaattttgccagctggatcgcgtttcttagatcatatttgaaaaaagatagaaacatacttgcaacattccagctggtccgacctatactctcgccactggtctgatttctaagatgtacctcagaccctacacttcgcgctcctgttacagcacgtaacatagtttgtataaaaataaatcattgaggttatggtcatgagccagaaaaccctgtttacaaagtctgctctcgcagtcgcagtggcacttatctccacccaggcctggagcgcaggctttcagttaaacgaattttcttcctctggcctgggccgggcttatagtggggaaggcgcaattgccgatgatgcaggtaacgtcagccgtaaccccgcattgattactatgtttgaccgcccgacattttctgcgggtgcggtttatattgacccggatgtaaatatcagcggaacgtctccatctggtcgtagcctgaaagccgataacatcgcgcctacggcatgggttccgaacatgcactttgttgcaccgattaacgaccaatttggttggggcgcttctattacctctaactatggtctggctacagagtttaacgatacttatgcaggcggctctgtcgggggtacaaccgaccttgaaaccatgaacctgaacttaagcggtgcgtatcgcttaaataatgcatggagctttggtcttggtttcaacgccgtctacgctcgcgcgaaaattgaacgtttcgcaggcgatctggggcagttggttgctggccaaattatgcaatctcctgctggccaaactcagcaagggcaagcattggcagctaccgccaacggtattgacagtaataccaaaatcgctcatctgaacggtaaccagtggggctttggctggaacgccggaatcctgtatgaactggataaaaataaccgctatgcactgacctaccgttctgaagtgaaaattgacttcaaaggtaactacagcagcgatcttaatcgtgcgtttaataactacggtttgccaattcctaccgcgacaggtggcgcaacgcaaagcggttatctgacgctgaacctgcctgaaatgtgggaagtgagtggttataaccgtgttgatccacagtgggcgattcactatagcctggcttacaccagctggagtcagttccagcagctgaaagcgaccagtaccagtggcgacacgctgttccagaaacatgaaggctttaaagatgcttaccgcatcgcgttgggtaccacttattactacgatgataactggaccttccgtaccggtatcgcctttgatgacagcccagttcctgcacagaatcgttctatctccattccggaccaggaccgtttctggctgagtgcaggtacgacttacgcatttaataaagatgctagtgtcgacgttggtgtttcttatatgcacggtcagagcgtgaaaattaacgaaggcccataccagttcgagtctgaaggtaaagcctggctgttcggtactaactttaactacgcgttctgataacgcgttcgcctggataaagtcacctgcatagcaggtgactttaactcccccacttcaccgaaagtagtgtcctcattgcttacctcctgagttttgcaaacagcctgttggcagcttgccctttcaaatcaataagcggtatccacagacaaacctgaagggaaaggcatattttcaggcgttctgctcgtccttctcaaagagtttacttttctgcatttccaggatactccccccccctggctattgtgcgctcatacactcaaattaaagataggttctaaataaatgagcgttttttgatagtctatttcattaggtaatatatatttgtaacaaatcaatcaaaatggaataaaatcatgctaccatctattagtatcaacaataccagcgcagcttacccagaatccatcaatgaaaataacaatgatgaagttaatggattagtacaagagttcaaaaacctttttaatggtaaggaaggaataagcacctgtattaaacatctacttgagcttataaaaaacgccatacgagtaaacgacgatccttatagatttaatattaataattccagtgttacttatattgatattgactccaatgatacagaccatattactattggtatcgacaaccaagaaccaatagaattacctgcgaactataaagacaaagaactcgtccgtactatcattaatgacaacatagttgagaagactcatgatatcaataacaaggaaatgatcttcagcgcattaaaagaaatatatgatggagatcctggttttatcttcgataagataagtcacaaactcagacatacggtaacggaatttgatgagagcgggaaaagcgaaccaacggacttatttacctggtacggtaaagataaaaaaggcgactctctcgctattgtaattaaaaataaaaacggaaatgattacttatctctcggttactacgatcaggacgactaccacattcaaagaggaattcgtattaatggtgatagtctcacccaatattgtagtgaaaacgccaggagtgctagtgcgtggtttgaaagcagtaaagctatcatggcagaaagttttgcaactggttccgatcatcaggttgtaaacgagctcaacggggaaagactgagagaaccaaacgacgtttttaaacgttatggtcgagcaataagatatgattttcaagtggacgatgcaaaatataaatgcgaccatctaaaagaaatagtttctactttagtcggtaacaaaattaacgttggccattctcaaaaaatatataagcattttaaggatctcgaaggtaaaattgaagaaaggcttcaaaatcgccaggctgaatatcaaaatgaaattaatcaaccatctgcgccaggtgttaattttgatgatatttaaaattatttttccagttttttgatttttcaacagctgaatatcggaaatagtcagtgacgaacatcagtatttttacataattacgtctaggtcattgtcggtttatctccttttacttgtggtaattgagggataacaacaaaaaaggtgagttttgcgactcaccttttttatttgtttcttattcagaatcaatatcttttaaatcatcctgaatcgcttgtgcgttcggattttcctgcggtttgagttcgccgccattagcgatgaaatcatgacgctggaagtacgcttcgcgcaccataatataaggatcggagctctgacgcagcagaccatcggaatccagcagctgagcgcgggtttcgatcccttcaagcgtccatttacccacagacatcggccaggtcagccaggaaagaaccgggtaaaaaccatccgccatatcaccaccgtcatcacgcagcgtgaagctaccgtagaacggtaactgaacgtaaggcccataacccacgccataatgaccaagcgtactaccgaagcggtgaggttcagtccgttgcagtttcgggttcgccatccctgcaacatcaataaaaccgcccatccccaaaatggtgttcaggaaaaagcgggtaaagtggaccatcccctgataagggtcgccctgcaagaagtagttaaccatcaccgcaggttcttcaaggttgccagtaaagttgctcaaaccgttacgcgccggttgcggaacataatcacgccaggcgacagcgaccggtcgaacaatatacgggtctaatacattgaagttgaagttgtacatggtgcggttgaacccttctaacgggtcagaacgcccttgctgatctgtaccggaactcgcacaccccaccagaagcgtagttcccagagcaagcgcgctcaggcgaagcttcataaatgtctccctgtttttttatggcttatgcagtttgccatccatgacggaacgataccgtatccgcctgtttaggtgtgggcgattgtaacagcacgtcaactgatgtccagacgccctgatttgctgatttgatcatagcctggtaatcgccgccctgtaggctacttgattctatagaaacagaaaaaggcaaacgcagccttttctacattttcagagtaactcccgtcagttgcgagcaaaaaagccgctacgctttagctatacgtgctaattcaagagaagagaccatggacaacgacaaaattgatcaacacagcgacgaaattgaagttgagagcgaagaaaaagagcgcggcaaaaaaatagaaatagatgaagaccgactcccctcccgggcgatggcaattcatgagcatatccgccaggatggtgaaaaagagctggaacgcgacgcaatggcgctactgtggagtgccattgcggcgggtctgagcatgggcgctagcttactggcaaaagggatatttcaagtcgaactggaaggtgtgccgggcagcttcttgctggagaatctcggttatacctttggttttattatcgtcattatggcccgccagcaattatttaccgaaaataccgtgactgcggtactacccgtcatgcaaaaaccgacaatgagcaacgtcggcttacttatacggttatggggcgtcgtgctgctgggtaatattctcgggacaggtattgcggcgtgggcatttgaatatatgcctatcttcaatgaagaaactcgcgatgcatttgtcaaaatcggcatggatgtgatgaagaacacccccagcgagatgtttgccaacgcgatcatttccggctggctgatcgccactatggtttggatgtttcctgcagcgggtgcggcaaagattgtggtgattatattgatgacctggcttattgccctgggtgacaccacccatatcgtggtcggttctgttgaaatcctctatctggtgtttaacggtacgctgcactggagcgatttcatctggcccttcgcactacctactttagcggggaacatctgcggcggcacctttatcttcgcgttaatgagtcatgcacagattcgtaacgacatgagcaataagcgtaaagcagaagcacgccaaaaagcagaacgtgcggaaaacattaagaaaaattataaaaacccggcataaatggcgagggtttaagcaatcgagcggcagcgtacttaccccgcactccattagcgggtatactcatgccgcattgtcctcttagttaaatggatataacgagcccctcctaagggctaattgcaggttcgattcctgcaggggacaccatttatcagttcgctcccatccgtaccagtccgcaaaatcccctgaatatcaagcattccgtagatttacagttcgtcatggttcgcttcagatcgttgacagccgcactccatgacgggtaaaaagtggataaaataattttacccaccggatttttaccctagagccatacagcctcacactcgatgaggcctgtcagtttcttaaaatatcctgatctaccatcgccgtcatagagcgtatttttattacctgatttgcaggttcgattccctattcggagatagcactcatgcaacacgaactacagcctgatagtctggttgatttgaaattcatcatggctgatactggctttggtaaaaccttcatctatgaccggattaagagtggcgacctgccaaaagccaaagttatccacgggcgagcaagatggttatatcgtgaccattgtgaattcaaaaataagctcttaagccgcgccaatgggtaaaatagcgggtaaaatatttctcacatctaaaaaacaccattccaatcaatcccctgctgcttcaagtagatgtctgcaggggacaccatccttgtgtttatccctaaaaccacataaaaaccgtaaattaaattcgaactagcaggccgaataaggcacaccaggaactcgtggttttattcattaactagtggtttttacctgttctcttagccagataataaacgcttcaatttttggccactgcctgcccggtaatgtggtgatgtaataatgctgatggcatttcaccgtcatatcgccaaacggcgcgacgagctcaccactggcaagccttttttgtaccaggcgttttcttcccatcgccaccccaatatgattcatcgcggcaataacagctaaatcagaacgatcaaagccaattccagaagatgtcggcaaattaaccgcataatgttgcgcccaactatgccattcatccgtaccggagtcgttgctccatgcctgtctgtcatggagcaacgtacagtgacacaggttaattaccgtgttggttaaagcatgtctttgagcgtattccgggctacatactggcaggatttcttcatccatcagaaagtgatgagtgagttgcgcactcggcgcatcatcaaagtagatcgccaaatcgattccggcacgttgcagattgacgttgtcattaccagtgagcacggtgaggctaatagacggataccggcgtgtaaagtcacctaatgcgggcaccaaccagcattgggcgatagagggccgggaatacagagttaacgttccgcttaactcctgatttttgatatcaagaatttcctggttcagggtatccaggctgctttttagcgcccaataaacacgtttcccctcgtgcgttaattccactttgcgatgggaacgaacaaacaactgaatgcccaattcttcttccagctgattgatacggtgacttaccgcactggggctcaggctcaattcctctgccgccagggcgaaggactgatgcctggcagccacttcaaaagtatgcattttacttaattgccagccgttaagcagccgatttcttatttcacgaaggggttccataatcacctcatttttcgcttaagtgtaaaaaaatagcggcaaaatttcagctatgagatgagctaaagtgaaccatatctcaattcaccttcatttttagatgtaaatcactccattgatgcaatttacctcatgtgaaaggcaaattttatcgtttgtcagcctgcgttgtttttttgtccaatatcatcaggttaatcacaggggaaggtgagatatgcactctcaaatctgggttgtgagcacgctgcttatcagcatcgtgttaattgtactgaccatcgtgaagttcaaattccacccgtttctggcgctgttgctggccagcttcttcgtgggaacgatgatgggcatggggccactggatatggtaaatgctattgaaagtggaattggcggaacgctggggttcctcgcagcggttatcggccttggcacgatactgggaaaaatgatggaagtatccggggccgcagaaagaattggtctgacacttcaacgctgccgctggcttagtgttgatgtcattatggtgctggttggcctgatttgtggcatcacgctgtttgttgaagtgggcgtcgtgctattgattcctctggcttttagtattgccaaaaaaaccaataccagtttattaaagcttgccattccgctatgtaccgcattgatggcagtgcactgcgtggttcctccacatccggctgctttatatgttgccaataagctgggcgcagatatcggtagcgtgatcgtctacggtttgctggttgggctgatggcaagtctgatcggtggcccacttttccttaaatttctgggtcaacgactgccctttaaacctgtacccacagagtttgcagatctcaaagttcgcgatgaaaaaacactaccgagtttaggcgcaacgttattcaccatactgctacccattgcgctgatgttggttaaaacgattgccgaattgaatatggcgcgtgagagtggtttgtatatcttggttgagtttattggcaaccctatcactgccatgtttatcgccgtgtttgtcgcctattatgtgttgggtatacgccagcatatgagcatggggacgatgctcacacatacggaaaatggcttcggttctattgctaatattttgctgattatcggggccggaggcgcattcaacgccattttaaaaagcagcagtctcgctgatacgctggcagttattctctccaatatgcatatgcacccgattcttctggcctggttagtggctcttattctgcatgcggcagtgggctccgctaccgtggcaatgatgggggcaacggcaattgttgcacccatgctgccgctgtatcccgacatcagcccggaaattattgcgattgctatcggtagtggtgcaattggctgcactatcgttacggacagccttttctggctagtgaagcaatattgcggcgctacgctcaatgaaacatttaaatactatacgacagcgacatttatcgctagtgtcgtcgctctggcgggcacattcctgctgagttttatcatctaagcgcaaagagacgtactatggaaaacgctaaaatgaacagcctcatcgcccagtatccgttggtaaaggatctggttgctcttaaagaaaccacctggtttaatcctggcacgaccagtttggctgaaggtttaccttatgttggcctgaccgaacaggatgttcaggacgcccatgcgcgcttatcccgttttgcaccctatctggcaaaagcatttcctgaaactgctgccactggggggattattgaaagtgaactggttgccattccagctatgcaaaaacggctggaaaaagaatatcagcaaccgatcagcgggcaactgttactgaaaaaagatagccatttgcccatttccggctccataaaagcacgcggcgggatttatgaagtcctggcacacgcagaaaaactggctctggaagcggggttgctgacgcttgatgatgactacagcaaactgctttctccggagtttaaacagttctttagccaatacagcattgctgtgggcagtaccggaaatctggggttaagtatcggcattatgagcgcccgcattggctttaaggtgacagttcatatgtctgctgatgcccgggcatggaaaaaagcgaaactgcgcagccatggcgttacggtcgtggaatatgagcaagattatggtgttgccgtcgaggaaggacgtaaagcagcgcagtctgacccgaactgtttctttattgatgacgaaaattcccgcacgttgttccttgggtattccgtcgctggccagcgtcttaaagcgcaatttgcccagcaaggccgtatcgtcgatgctgataaccctctgtttgtctatctgccgtgtggtgttggcggtggtcctggtggcgtcgcattcgggcttaaactggcgtttggcgatcatgttcactgcttttttgccgaaccaacgcactccccttgtatgttgttaggcgtccatacaggattacacgatcagatttctgttcaggatattggtatcgacaaccttaccgcagcggatggccttgcagttggtcgcgcaagtggctttgtcgggcgggcaatggagcgtctgctggatggcttctatacccttagcgatcaaaccatgtatgacatgcttggctggctggcgcaggaagaaggtattcgtcttgaacctagcgcactggcgggtatggccggacctcagcgcgtgtgtgcaagtgtaagttaccaacagatgcacggtttcagcgcagaacaactgcgtaataccactcatctggtgtgggcgacgggaggtggaatggtgccggaagaagagatgaatcaatatctggcaaaaggccgttaataacgtttcaacgcagcatcgcaatcctttccctgggtgagcgatgctgccgatggcgcagacttaagatccccggtcttacccgctataaccccctccttttatcatcacccaacgcctttcgctgtaaacggcggtttcgcaaaccaaaccaaaaccgtaagtaagataaaagcaatagccgccatacggaaaatctcatttgcagaaatagaaagactctgctgggttatttcattattaatttcattaagaactccactaaggctaccataatatttatccataatttgactgctactattaaacacggggttaaattgatcgatggttgctgtcaactgactatggtgtaagctttcgcgtcgtccccacagcgtcattgtcaagctcgtaccaacacttccactcaaggtacgaaaaaaattactcatactgctggcattggcaaatttattatctggcaagccactaaagctaatcgttgttaagggtaaaaagaaacaggcaacggcgaatccctgaaaaaactgcggcaaaatgatgcctgtaaaatcaatcgttggcataaatgtcacagaacgccagtaatagcaaaccgcatacatcaaaaaactaaatgtcactaacaaccgcatgtctattttgttgccataacgtcctatcaaaggactaattaatagtggcatgatgccgatgggcgcataagcaagtccggcccatatcgcattataccccatcgtttcctggagtaactgcggcataaggacgatcgctccagagtaaaataaatacgcgcatgtgatactcacaataccaatggtgaagttacgggacttaaacaaactgagatcaagaatcgggttctcactggtgctctcccaaatgactaaagagatcagagaaataacacttactactgttaatattattattgtactgctgttgaaccaatccagatcgcgccctttatcaagcataatttgcaagccaccaacaccgagcactaacagggtcagtcctggtagattcattttgaccggactagtctcagtttctcttcctttaagtaaggttaagcataatgtcaggacgataatccccatagggacattgattaaaaatatccaaccccagctaaagttatcacaaatataaccgcccaatatcggcccacatatcggagcgataatcacggtcatactccataatgccagagcaaatgttcttttttctggcggataattccttaataataaactctgactcagtggaattaacggccccgccattaacccctgaacgactctaaaaaatatcagcacatcaagattggtgcttaggctacacattaaactagacaggctaaaaaaagtgacactaagtaaaaataatcttaattcgcctattctttgtgccaacctgccagtaacagggatcgcaatggcatttgctacaccaaagctggtgataacccaggtgccttcgtctgtacttgctcccagaaagccagatattgtcggtattgcgacgttagaaatagtggaatccaacatttgcataaatgtcgctaaactcaatgcaatagtgacgcaccataacgtcccaccggttaatggtgccggagtacttttagtgattgccattaaagttgtccattatggctaataatgttgctaatttctttttctatcggactggtatcgataactaaagccttactggtataagccggcatggaggtcacggtactagccagctcaggcatctcggcaatgtcttcgttcttcgtatcaatagttgctgtcatgcttaaaccaatacgcaaggggtgttccatgagttcttttggatcaagagaaacttcaaccggtacacgctgaacgattttgatccagttccctgtcgcattttgtgcaggtaataaggagaacgcattgccggttcccatattgatccctgtcacccgaccatgaaacacaacattttcaccataaagatcgctgataatattgacgctttgaccaatccgtacatccgtgagttgtgtttctttaaagttggcattaacccacatttgacgtgccggtacgacagccattaagctttgtccggggctcactgtttcgccgacctgaacacttctctgggcaatatagccggtaaccggactcttaatatccgtacgtttaagcgccaaccaggcttctttagttgcatccgccgcttcaacgacttgtggctgacggtttaatggtgtgttcattactaaagctttattcgctttataagcctggatagcggcattcaatgccgctttgctacttattaacgtatctttggtatgctccagcgtttctttactaataaccccctgcttcgctaacggcactcgacggttataatcttctaaagattgttgatactgaatacgtgcactagcgacttcggcactgtattgtttatcctgtaagtatagtttattcgtttgccgaacaatatttgccagattatttttagctttattgagtgcgatagtggcatcagttttatccagactaactaaaatgtcaccttgtcgaacgtagttcgtatctttatgattaacgacagtgacactaccactgacttgtgcagaaattggatctgcattccccgtgacataggcgtcatctgtactaatcatgtcttctaattccatactccaataggcataggcaccactaaacgcaataaataaaactaccgccaataaagaaaagtattttcttctgttagaatgttttttattactattaatctgttccactattatctctcatttctcatagatgaaatttatgaattgaatgaaaagagcattcattcttcatatcaaacacagtgcatgtgttgcacattatcccaggaacgttggaggcctaatttaaatgaggtgcaaaaaaaacaacagaggactaaaccgtggcttttgcaatacaattcttacgcctgtaggattagtaagaagacttatagtgccaacttgaaactataaatcatcggtacaatccctgattttattgttgacatttcatttatgccgactatttatatggtatacttgtcgaattatcttaaaggaagctcagattttcttatttttattgagaaaatgagatgacgccttatgtctgtattactacagggagaagggagatgcttcattgcaaagggaataatctatgaacgcaataattattgatgaccatcctcttgctatcgcagcaattcgtaatttattgatcaaaaacgatattgaaatcttagcagagttgactgaaggcggaagtgccgttcagcgggtggaaacacttaagcctgatatcgtcatcattgatgtcgatatccccggagttaacggtatccaggtgttagaaacgctgaggaagcgccaatatagcggaattattattatcgtctccgctaaaaatgaccatttttacgggaaacattgtgctgatgctggcgctaatggtttcgtgagtaaaaaagaaggcatgaacaatatcattgcggctattgaagctgcaaaaaatggctactgctatttccccttctctctcaaccggtttgttggaagtttaacgtccgaccagcaaaaactcgactccttaagcaaacaagaaattagtgtcatgcggtatattcttgatggcaaggataataatgacattgctgaaaaaatgttcatcagcaacaaaactgtcagcacttataaaagtcgcctgatggaaaaattagaatgtaaaagtctgatggatctttacacattcgcacaacgtaacaaaatcggctaaccacatgaagtttttaccctatatttttcttctctgttgtggtctttggagcaccataagtttcgcagacgaagattacatcgaatatcgtggcatcagtagtaacaaccgtgtcacacttgatccactacgtctgagcaacaaggaattacgttggttagcgagcaaaaaaaatcttgtgattgcagtacataagtcccaaacggctacgttgttgcataccgatagccagcaacgggttcgtggtattaatgctgattatttaaatcttttaaaaagagcgttaaatatcaaattaacactccgggaatacgcagatcatcaaaaagcaatggacgcgcttgcagaaggtgaagtcgatatagtgttaagtcatttagttactagcccgcctcttaataatgacattgctgcaaccaaaccattgataattacctttccggcgctggtaaccacccttcacgacagtatgcgaccgcttaccagtccaaaaccagtaaatattgctcgggtagcaaattaccccccagacgaggtaattcatcaaagttttccaaaagcaacaattatctcttttacaaatttatatcaggcattagcatccgtcagtgctgggcacaatgattactttattggtagtaacatcattaccagcagtatgatttcccgctatttcactcactccttaaatgtagtgaaatattataacagcccgcgtcaatataattttttcttgaccagaaaagaatctgtcattcttaatgaagtactcaatagatttgttgatgctttaacaaatgaagttcgctatgaagtaagtcaaaattggcttgatacaggaaacctggcctttctgaacaaaccattagaactcactgaacatgaaaaacagtggattaagcagcatcccaatttaaaggtgctggaaaatccttacagccccccctattctatgacggatgaaaatggcagcgttcggggcgttatgggggacattcttaatattattaccttgcaaacaggtttaaatttttctccgatcaccgttagtcacaatatccatgctggaacacagcttagccccggaggatgggatataatacctggcgctatttatagtgaagatcgagaaaataatgttttatttgctgaagccttcataacaacgccttacgtttttgtcatgcaaaaagcgcctgacagtgaacaaacattaaaaaaaggaatgaaagttgccattccatattattatgagctgcatagccaattaaaagagatgtatccggaggttgaatggatacaggtcgataatgccagcgctgcatttcacaaggttaaggaaggtgaacttgatgctctggtcgcgacacagctaaatagccgttacatgatcgatcattactatcctaatgaactttatcattttcttattcctggcgttccgaatgcaagccttagcttcgcttttcctcgcggagaaccggaacttaaggatattattaataaagcactgaatgcaattcccccaagcgaagttctgcgcctgacggaaaaatggattaaaatgcccaatgtgaccattgacacatgggacctatatagcgagcaattttatattgttacgacattatccgttttattagttggcagtagccttttatggggattctacctgttacgcagtgttcgtcgtcgtaaagtcattcagggtgatttagaaaaccaaataagtttccgaaaagcactcagcgattccttaccgaatccaacttatgttgtaaactggcaaggtaatgtcattagtcataatagtgcttttgaacattatttcactgcggattactacaaaaatgcaatgttaccattagaaaacagtgacagtccctttaaagatgttttttctaatgcgcatgaagtcacagcagaaacgaaagaaaatcgaacaatatacacacaggtatttgaaattgataatggcatcgagaaaagatgcattaatcactggcatacattatgcaatcttcctgcaagtgacaatgcagtatatatttgtggttggcaagatattactgaaacgcgtgatctaattaatgcactcgaggtagaaaaaaataaagcgataaaggctaccgtagcaaaaagtcagtttctggcaacgatgagtcacgaaataagaacaccaataagctctattatgggcttcctggaacttctgagcggttctggtcttagcaaggagcaacgggtggaggcgattagtcttgcctacgccaccggacaaagtctcctcggcttaattggtgaaatccttgatgtcgacaaaattgaaagcggtaactatcaacttcaaccacaatgggtcgatatccctactttagtccagaacacttgtcactctttcggtgcgattgctgcaagcaaaagcatcgcattaagttgcagcagtacgtttcctgaacattacctggttaagatcgaccctcaggcgtttaagcaggtcttaagtaatttactgagtaatgctctcaaatttaccaccgagggggcagtaaaaattacgacctccctgggtcacattgatgacaaccacgctgttatcaaaatgacgattatggattctggaagtggattaagccaggaagaacaacaacaactgtttaaacgctacagccaaacaagtgcaggtcgtcagcaaacaggttctggtttaggcttaatgatctgcaaagaattaattaaaaatatgcagggcgatttgagtttagaaagtcatccaggcataggaacaacatttacgatcacaatcccggtagaaattagccagcaagtggcgactgtcgaggcaaaagcagaacaacccatcacactacctgaaaagttgagcatattaatcgcggatgatcatccgaccaacaggctattactcaaacgccagctaaatctattaggatatgatgttgatgaagccactgatggtgtgcaagcgctacacaaagtcagtatgcaacattatgatctgcttattactgacgttaatatgccgaatatggatggttttgagttgactcgcaaactccgtgagcaaaattcttccttacccatctgggggcttacagccaacgcacaggctaacgaacgtgaaaaagggttaagttgcggcatgaacttatgtttgttcaaaccgttgaccctggatgtactgaaaacacatttaagtcagttacaccaagttgcgcatattgcacctcagtatcgccaccttgatatcgaagccctgaaaaataatacggcgaacgatctacaactgatgcaggagattctcatgactttccagcatgaaacgcataaagatctacccgctgcgtttcaagcactagaagctggcgataacagaactttccatcagtgtattcatcgcatccacggtgcggctaacatcctgaatttgcaaaagttgattaatattagccatcagttagaaataacacctgttagtgatgacagtaagcctgaaattcttcagttgctgaactctgtaaaagaacacattgcagagctggaccaggagattgctgttttctgtcagaaaaatgactaaatagcggctcccacaatgttcaaatgtgggagctatttaccagcacatcttacatttaactactgaactcctggcgaatttgttccccatgctggtcgagcgttgccgctcccggcataacatgcgggtccgcgcagccgctgatttttatcggattacccggcatcattattcccccggcttcaatcaacatatttctcgcctgagtttgtggcaatttaatggcctcagccacacttaataacggcgcgacgggtacaccaacttcatgtattctggctaaccaaacttcagctgcctgcgtttttaacgtccgctcaatatattgtttaagaatagcctggttttgtacgcgtaaaatattgctgctaaatcggggatcattaaccagttccgtaagctccagtgcctggcataacgcagaaaaaagcttgtcattaccacaacaaatcgtaatcggcttatcctgagtattgaaaacatcaaaaggtgccatgtagggatggcgatttcccagacgttgtggactcttcccagttgcgatatatgccatcagaccatgctccagaaaactcagcgtggcatcaaacatcgctatatcgacatgcgcccctctctggctcttttcgcggccataaagtgcactcactattccgctgaataaatagacaccgccgcatagatccgcaagagatgtaccaacgcgcactggcggagcatcaggatatcctgtttccatcattatcccgctcattgcctgaatgatggtatcgtaggcaggagcatcttttagcggaccggtatgtccgaaaccactgctactagcatatatgaggcgcgggttgatttcttgaagcgtttcccaactaaaccccagtttttccattgtacctgggcgaaaattctcagctaatacatcagcttgtttgagcatatttataaatatacttttatcgtgatcattctttaaatcaagaaccacactctctttgccatgattaataaaactgtaatagagactctgtccatccacatagggaccaaatgtgcgggtatcatcaccatgacccggcggctcaactttaattacccttgcgcccatattacaaagaagttgagttccgaaaggtccattaaggacatgtgtcatatcgataactaataagccttcaaacggccctttgctttcattatttgtcatttgcttatgccttgaaaaaagccgaaggtgaaaagacacttcggcatttatgtaaaatcaataacatgattaattaactaaccagtcgactgacataaatccacaagggagccgtgacgacaaagcccagtacgctcacagccaaactcgctgtaccagtacgggtgtagacattaaaccggctggcaataatgattccggagaatgccggcggtaatgcgcctgccagtaccatcatctgcagatgttcgctgttcaaatgacatgccataccaacgagaagcagtgccagtggcatcagaatcagcttcaggaaggtgttataagcaatttcggcactgaactcgaatttatgtgcagccagagtcaaccccgcagcgaataccgctaccccactgttagccttcgcaatcagattaaaggttgggtcccatgctgccggaatttttaccccaaccaacaccaggatcgttgccagaacaggtgcccatactactggctcctttgccgcagaaattaatgcgctcagattactattcttcttaccatccgctccactagaaggattcagcaaatacagaccaataggaatagtaattgcgttaacaataatagaaataattgctaccactaaacctgtacttacggaatcaccataaataggatcgagaactgcaaaccccaggaatccaatggtaggactacctgcaattaatgcacatacagctgcttctgcatgggtacgtttaaaaaatttgtagcaaccgaaccaggagaaaaagaaacatccgacaataaccacaagacttacaagggtcagacgagtgtccgcaaaaatcatttccctgtttgcccgagtaatagatacaaatagagccgcaggaagcgcgtagtttaataccagtttattaaatgcccgagcttgatcttcactaaatgtttctcgtctgccgctaaaataacccaacagcatgattacgataataggcaataaatcgccaataaaaaatgttagcataatagtatttccgataagggtcccctcaccatcgcataatgagttggcaagaggagacgatgtcagtatttaattaccagcgacttgttttgggttaagtttggtaatatggccactttcagttcctgctgcagggtcgatgaccacattaataatggtcggtttgcggctctgaataccggtggttaaagcatgacgaagttcatctgtcgtggtgacgttatagccaacgccacgaaacgcatccattaatttgtcataccttgcatggtgcaacagatccgttggacttggtgcaccagcgccactgagatcaacaccgtctcctctgtagatgccgccattattaaaaataacgatcgtcaccggcaggttatatcgacaaatcgtttcaatttccatcccactgaaaccaaaagcactatcaccttcaatggcgacaaccggagaaccagaagtcacgctagcaccgatggcatagcccataccgatgcccatgacaccccaggtaccacaatccagacgacgacgtggtttatacatatcaataatatttcgtgcattatccagggtatttgcaccttcattaactaaataaatatcctggttctcgcgcaatacgtcgcgcacagcacttaatgcattaaagtaatttaatggttgagtatctgtacttaatttttcatgcattttttgtgcattttgctgcttgtggatatttaaaatatcgcgccataccagtggagtcgtaaatgtgttttgtttcagttctgccagcataccttgcatactggatgcaatatcaccaacgactggcacagcaatggggcggttgctgtcaatttcctgcggttcaatatccagttgaataaactgtgtatctgccgcccatccttttttaccgtgtgccaataaccaattcagtcgtgcaccaacaagcatgacaacgtcagcatttgccagggcaaagctacgcgcagctgccgcagaaagtggatgcgtatcttcaaggatccctttcgccatagacattggcaggaatggaatctgagcactttcaataaattcacgaagctgttcatcagcttgactatacgccgcgcctttgccaaggataattaatggccgttcagcttttgctaaaaggctaattgcgctagtgacactcttcgggcatggcaataatgctgggctcggattttcaactttaacaatcgtggttaacgcttcgtctttttccatcgtcgcggccaggacatttgctggcaaatcaagataaactccgccagggcgaccgcttacagagacccggatagcgcgtgccaatgcaatgccaagatcctgcggctgattaacgcgaaatgctgctttggcatacggttttgccgcattcatttggtccagctcttcataatcaccttgctgtaggtcgacgatcgcgcggtcgctggagccgctaatcatgatcatcggaaaaccatttaccgttgcgttggccaatgcggtcaaaccattgaggaatcctggcgcagaaactgtcaggcagatccccggtttttgggtaagaaaaccgcttgccgcagcggcatagcctgcgctctgctcatgacgaaaaccaatataacgaatgccttccgcctgggcatggcgtgccatatccgtcacaggaatacctacaacaccataaatagtgtcaatattattctgttttaatgcttcaacgatgatatgcataccatctgtcatttgaagttgatcactcatgattaataacctcgaaatttttataaattgggagccagaagcccccgttaatatcagatggcgtggttttgcttcattgcagcaatttcatcgtcgctataacccagctcctgcaatacagcagcggtatgttcacctaatagcggcgcagctttaatatccggcgtaaaggcagagaatttcattggacaaccaacggtcagatattttccacgcaacggttgttccacttcaacaacactgccactttggcgcaaagagggatcaagactaatttctttcatacttaaaaccggtgcacaaggaatatcaaactgagtcaaataggccaccgcttcatgtttatcaatagtgacagtgtatttttcgatttcagcaaaaatatcgaaaatatgtggctgtcgtgcatgggctgtactgtatgccggatcggtaatccattctggtttgccgatggctttacaggtgttttcccagttttgctcctgaatagtgaaataaatataggcgttaggatcggtttcccagcctttacatttcaggatccagccaggctgaccgccaccacctgcattaccaccgcggggaactgcatcaccaaatgtaccattcggatactgcgggtattcttccagataacccaatttatcgagacgctgctggtcacgtaatttcacgcggcaaaggttcaatacggcatcctgcatactcatggtgactcgttgcccacgccccgttttttcgcgatgcagcaaagcagcaagtaaaccgatcagcaaatgcattccggtgttgctgtcacccaacgctgcagcgcttaccagcggcggaccatcccaaaaacccgtagtggatgccgcgccacccgctgcctgagcaacgttttcataggcttttacattcacataagggctacactcatcaaaccctttgatgctaccaaaaatcagacgtggattgatttcttgaatatgctcccaggtgaagcccatgtgatcaatggcccctggatgaaagttctcgactaagatatcagcttcgcggatcagcttttccattacctctttgccttccgctgttttggtatttaactcaatagaacgtttgttactgttaagcatggtgaagtaaagcgcatcgatatcaggaatatctcgcagctggtgacgcgttacgtcaccaacgccgggacgttcaattttaataacgtcagcgccaaaccaggccagcatttgagtacaagatgggccagattgcacaccggtgaaatcgagaactttaattccttgaagtggagtactcatagcaatacctattagttaattaaatatgtgttaatttagcgtttatttaaggcgtaatatcttctataaataacccgcaaaatatcgtcgtagctgcactcgatatttttaaaatcctgtatcaagtgctgaaaatcatttcatcgccacttccaattcctttctgcatggtaagtagtgaggacgaaaagaagaatatgataaatattgattcgtggtaatcagagagagtcgcgacatttgtgatgttattcttacaactgtaagaagcgccggtgatttacaagcaagggtatgattacgctttttaaagcgtaccataaaacataacataataaatgatttgtgatgacacgggattattgcggtttactttgaggaatataaaatgcgagtttatagcaccgcgagcgccaaataattttatgaccacaacctgtcgtattgtggtcataaaaaattgtcggctggagggagttaaatcctttacctcaatatactgcctgtcagcattagttcacaaacagtgcttcgctatcgacgatgattccatcttccgcacctttaagcgccaggtttgcctcgtagtattgctttttatcaagcagtttctgcgcatcagcaagtgcattacgagtctgtttaagtggcatcagatattggttttccattacgccaacaccggccaggcgaagctcttccattgcgccctttttatcccctttcgccattttttcattggcaatttttatcgcggcttctttttcgggagttgctacataactctcagaaattccgacagatgcattaatgacaatatattggtcatcattgagattggtctttttacctggcttagcgaactttgcccattcggtactgtcatcactcagcaaagcggaagcttcattggtcagttcttttgccttttctggatcgccatgaaacagagccaggcgcgctacctgcacgtcacgcatcgcatataaaccttgttcagagatacgctctgctgccgctgccgttttctgggtttgctgaacttgctgagtttgctgttgtgccgctaccggagcattatcagcagcccatacagtactagatgccagaattgctgtgaccatcgtggccataattaaacgtttcatacttacctcattctttaacagttttagaaaacgccgccatcatattgggtgagcatgaaatgagaaatcagagagcaacggtcattttgaaagggttatcttacagttgtagttattatcgcaagaagtattttagtcttacaattgtaggaatatgcttcctgtcgcagagaactattcttatataccacaaagagatgtcatttattatatcgatgtaaatactgattaattaaatgtaaatacagccataacatcgtaggttctcagtgaaccattttcaggataactttctatgaaagtaaacttaatacttttcagcttatttttattggtctctattatggcatgcaatgtttttgcattttccattagcggtggtggaagtgagaggagctataaagagactgaaaaaacaagtgcgatgacgaccacacactctacaaaacttcagccaagtcaggcgattttgtttaagatgagagaagatgcgccaccattaaacctcacagaagaaatgccgcccccttttccgacaaaggcgaattatcttattcatcctgtgcgataacgtctttcacatggcaggtgaacaatcatgtctgatgctgatgtgaacacctgcccaaatgagccatcctgacccattaccgcctgccataccccaccataaagcgaatcatcaagccacaagccggggcaagaaacataaatatccccgtcactagttcattaccgccagttaaccacatggtgaagtaataaatgagtgcagcgaggatcaccatgccgaagaaagaagagaccgcgcttaccacgttcagtacctgaccgatgtagccgcttacgcagacaatacacagggcgagaaacatccataaattaatcatagctcaacctcctgccgcgctaaaaaacctgtaacttcagtcactttaatagtaagacaatccttaacctctggcaatttttgctaagcatcaatgaaaacagcatgttaaatgcaagactgttgtgtacggaaaaatatttactttgcacgattaataatcagtagctgaaagcagtcagcgagtgataaagtacagataccgcattcatgctcctcgtggttatgtcctgactagtctttacactctttacaggaaccattgtcgtacatgatggcccaaccaattgagtgtaccgctgtcgacatggaatcttctgcgatacaacaattcgtatctacagaaggtaactatgtttccacaatgcaaattttcccgcgagtttctacatcctcgctactggctcacatggtttgggcttggtgtactctggctttgggtacagcttccttatcctgttctctgctttctcggcacgcgtattggcgcaatggcgcgaccattcctgaaacgtcgtgaatctatcgcccgtaaaaacctggaactttgtttcccgcagcattctgcggaagaacgcgagaagatgattgccgaaaactttcgtagtctcggcatggcgctggtagaaaccggcatggcatggttctggcccgacagtcgcgtacgtaaatggtttgatgttgaagggttggataaccttaaacgcgcacaaatgcaaaatcgcggcgtaatggttgtcggcgtccattttatgagcctggaactgggcggccgcgtgatgggactgtgccaaccaatgatggctacctatcgtccacataataatcagctgatggaatgggtgcagacccgtgggcgcatgcgctctaacaaagcgatgatcggcagaaataatctgcgcggcattgtcggtgcactgaagaaaggtgaagcggtatggtttgctcccgatcaggattatggtcgtaaaggcagctccttcgcgccgttctttgcggtggaaaatgtcgccacaaccaatggcacctatgttctctcccgtctctctggcgcagccatgttgaccgtaacgatggtaagaaaagcggattacagcggatatcgtttgttcatcaccccagagatggaaggctacccgacagatgaaaatcaagccgctgcctatatgaacaagattatcgagaaagagatcatgcgcgcaccggagcagtacctctggatccaccgtcgctttaaaacgcgcccggtgggagaaagcagcttgtacatttaacaaactgctcttactctttccctcctcaaatcggccataataacctcatggtttttatggcttttttcttaaggttttttccttcgctgaatatctaattattaccgtcagaaattaaactgtcgccgatatgagacacttgtaagttactaaaagtaaataagaaaatgcctcttgtctcgtttcagttttaggcgtacattagcgccgtctcgagcagtttagctcagaattctggggtgatgcccacggtaaaatacagggcttttaaggtcgctttgcccggtgtcaactcactgtatcaggtgtaatgaagtcattcaggcgtaacagtaattacgcggagagatgtaaagtgaaatatttctttatgggcatttcttttatggtcatcgtttgggccggtacttttgccctgatgatctaaaagcaaactgtgcaatgaaaaacaggagccatcaggctcctgtttgcatttctgacgacggtgtttattccgcgttttcgtgaatatgtttgctgctggcgggtagtaaaccgtcggcacggaacatcgctttaatccctctgatggcctgacgaatacggtcgcggttttcaatcagtgcaaagcgaacatgcgtatcaccatagtcgccaaagccaatccccgggctgacacaaaccttcgcttcgttaaggagcttcttggcaaattccaggcttcccatggccgcatatggttccgggattttcgcccagacatacatgctagccttcggcatttcaaccatccagcccgcttcatgcagccctttaaccaatacatcacggcggcgtttgtactgttcggcaatgtcgcgcacgcactgttgatcgccctccagcgccgcaatcgccgccacctgcaacggcgtaaaggtgccgtaatcgtgatagcttttaatacgagccagggcgctgaccagcgttttgttgccaaccataaagccgatacgccagcccgccatgttgtagcttttgctcagcgtaaagaactcgactgccacatcgcgtgcacccggtacctgcataatactcggcgctttccagccatcgtagacgatatcggcataggccaggtcatggaccaccagcacatcgtagcgtttcgccagcgccactactttttcgaagaactccagttccacgcattgcgcggttgggttactcgggaagccgaggatcatcatcttcggtttcggataactttcacgaatggctcgctccagttcgttgaagaaatcgacaccttccaccagcggcacactgcgtacctgcgccccggcaatcaccgcgccataaatatggatcgggtaacttggattcggcaccagcaccgtgtcaccatgatccagcgtcgccagcatcagatgcgccaggccctctttgctaccaatagtgacgatggcttcactttccgggtcgatttcaacgtcgtagcgatcctgataccagcgggaaatggcgcgacgtaaccgcggaatgccgcgactagtggagtaaccatgcgtgtccgggcgctgggccacagtacataatttttcgacgatatgcggcggagtcgcaccgtccgggttacccatgctgaaatcgataatatcttcgccgcgccgacgcgcagccattttcagttcagcggtgatgttaaaaacgtagggcgggagacgatcaatgcgcgtaaagcgacgttcagggcgagtgtcagccataatttcctcagattaacgttagcgcccggaccgtccgagcgacgctgccacgatggtggctgttttgaaaatagcctgattaatttctgtctgtccagtgttttagaacattttattaatgacgttaaatgaggaactctgctttaaaaacaggaaatttatctgcgctaacaagaaaattaccactcattttattaacataataatttcaataaatttactaaccagaagtgcattatcaagagatgcattgctaatacaccatttatctatcaatccccttttaaaattgtggtttttcctcaaaaacggcctgctggtcatcagccttcaggttacctatcatagaggtttaatccttattcagagtcacccgtgcacgaaatattcaacatgctgctggcggtcttcgatcgggcagcgttaatgcttatctgcctgttctttctcatccgtatccgcctgtttcgcgaactgttgcacaagagcgcgcactccccaaaagaattgctcgccgttaccgccattttcagcctgttcgccctgttcagcacctggtccggcgttcccgtagaaggcagcctggtgaacgtacgtattatcgcggtgatgtccggcgggattctgtttggcccgtgggtaggcatcattaccggcgtgattgcgggtattcaccggtatttaattgatatcggcggcgtgacggcgatcccctgctttatcaccagcattctggcgggttgtataagcggctggatcaacctgaaaatccccaaagcacagcgctggcgcgtcggtattctcggcggcatgttgtgtgagacgttgaccatgattctggtaattgtctgggcaccaactaccgcgttggggatcgatatcgtctctaaaatcggcattccaatgatcctcggtagcgtctgtatcggctttattgtgcttctggtgcaaagcgttgagggcgaaaaagaggccagcgccgcgcggcaggccaagctggcgctggatatcgccaacaaaacgctaccgctgtttcgccatgtcaatagcgagagtttacgcaaggtctgcgaaattatccgcgatgacattcacgccgatgcggtggcgattactaataccgatcatgtgctggcctatgttggcgtgggtgaacataactatcagaatggcgatgacttcattagcccgactacccgtcaggcgatgaattacggaaaaatcatcattaaaaacaatgatgaagcccaccgcacaccagagattcattccatgctggtgatcccattgtgggagaaaggggtcgtgaccggaacgctgaaaatttactactgccacgcgcatcagatcaccagcagtttacaggaaatggcggtcggtctgagccaaatcatctccacgcaactggaggttagtcgcgccgagcagctacgtgaaatggcaaataaggcagagcttcgcgccctgcaaagcaaaattaatccccattttctgtttaacgctctgaacgctattagtagcagtatccgtctgaatccggataccgctcgccagttgatctttaatctgagccgttatctgcgctataacattgaattaaaagacgatgagcaaatcgatatcaaaaaagagctgtatcaaattaaagactatattgccattgagcaggcccgctttggtgacaagctgacggttatctatgatattgatgaagaggtgaattgctgcattcccagcctgctgatccagccgttggtggagaacgccattgtccacggtattcagccttgcaaaggtaaaggcgttgtcaccatcagcgttgcagagtgcggaaatcgggtacgcattgcggtgcgagataccgggcacggcatcgatccaaaggtgattgagcgggtcgaagcgaatgaaatgccgggcaataaaattggcctgctgaatgtccatcatcgcgtgaagttattgtatggcgaggggctgcatatccgccgcctggagccggggacggaaattgcgttttacattcctaaccaacgcaccccagtcgccagtcaggctacgttattgctttgagccggagtgatattgtgaaagtcatcattgttgaagacgaattcctggcacaacaggaactgagctggctaattaaagagcacagccagatggagattgtcggcacctttgacgacggtctggacgtgttgaagtttttgcagcataaccgcgtcgacgccatttttctggatatcaatattccgagcctggatggcgtgttgctggcgcaaaacatcagccagttcgcccataaaccgtttattgtgttcatcaccgcgtggaaagaacatgcggtagaagcgtttgaactggaggcgtttgactacattctcaaaccgtatcaggagagtcgtattaccgggatgctgcaaaaactggaagcggcctggcaacaacagcagaccagcagtacgcctgccgcgacggtaacgcgtgagaatgacaccattaatctggtgaaagatgagcgaataatcgtcacgccaattaacgatatctattacgccgaagcgcacgagaaaatgacctttgtctatacgcggcgtgaatcctacgtaatgccgatgaacattaccgaattttgcagcaaactgccgccgagccattttttccgctgccatcgcagtttttgtgtcaatctgaacaaaatacgcgaaatcgaaccgtggtttaataacacctacattctgcgactgaaagatctggattttgaagtgccggtcagccgcagcaaagtgaaagaatttcgccagttaatgcatctttaatcgggaactttcatgaaagcaccaggcttgcccgccgatcaacaatttttcgccgatctgttcagcggcctggtgcttaacccgcaactactggggcgcgtctggtttgccagccagcctgccagcttgccggtgggcagtttatgtattgattttccccgtctggatatcgtgctgcgcggcgaatacggcaatctgctggaagcaaagcagcaacgtttggtggaaggagaaatgctgtttattccggcgcgcgcggctaatttaccggtcaacaacaaaccggtgatgctgttaagcctggtgttcgctccgacctggcttgggttaagcttttacgatagccgcaccacgagcttgttgcatcctgctcgccagatccagcttcccagcctgcaacgcggtgaaggtgaagcgatgcttaccgccctcacccatcttagccgtagcccgctggagcaaaatatcattcagccgctggtgttaagtttgctgcatctttgccgtagcgtggtgaatatgccgccgggcaatagccagccgcgcggcgattttctctatcacagcatttgtaactgggttcaggataattatgcccagccgctcacccgcgagagcgtggcgcagttttttaatatcacgcccaatcatctgagtaaactgtttgctcagcatggaacgatgcgttttatcgagtatgtgcgttgggtgcgaatggcgaaggcgaggatgattttgcagaaatatcatctgagtattcatgaagtggcacagcgttgcggttttccggatagcgactatttttgtcgcgttttccggcgtcagtttggtctgacgccgggagagtacagcgcccgttttcagggctaacgtcagaaggttaattctgtttccagcagcgtcaggatactttgtgcatcttgcgcggcaaacaagctctggcggaagtttttattcaccagtttacgcgccagctggctgaagactttcacatgattcatcccttcgttagcacccagcgtcagcatgatcaccagttcgacttcgcccatttcactctgccagccaatcggtttcgccagccgggcaatgctgatactggaatgacggatccactgagatttggtgtgcgggatcgctacgccaaaaccaacgccggtggtaacaatctcttcccgctgccagacatcttcttccagctcaaacggatgttcagtgcgcccgttaacgccgaggttgccgcacaggaactggatcgcctgctctttattgctaaaatcctgatcaacaaagatattctccagcgccagcagtgggcgaacgtcttcttccggcgtaaaggcggtgagtaacgcttcaatttcctgcgcactgcggcattcacatgcctgacgcgccagttcccgacacgcctcgctatccagttgacgaagctggcttttcaccgccggaatacgcgggctactcatactcagctcatccaggcccagcccaagcagtagcggcagataacggctttcaccgcccagttcaccgcaaatgcctacccatttgccccgctgatgcgcagtggtaactatttgctgcaacatgcgcaggaagcttggcgtaatcgggttatatagcgggcttacgcgcgggttattacgatcgaccgcatacagatactgggtcatatcgttggagccgatactgaagaaatcgacctcatcgcagaagtggtcgatgatgtagcacacgctcggaacttccaccatgatcccaagcgtaatcgtctctgcatgacgcaggccatcgcgcttaagctcaacgatcgctttttggatctcgcctttcacccataagatctgatcgaggctgtgaaccatcgggatcatcaactgggcgttgccgaaactggcggcgcgcaaaatggcccgcagttgagtgcggaacaggccagcaaattccgggtaaatacgtaccgcgcgatagccgaggaacgggttctcttcctggggaatattcagataaggaatgcttttatcgccgccgatgtccatcgtgcggaagataatcggcttgtcgcccgccgccagtagcacctgctggtaggcttcaaattgctcctgctcgtccggcgcgctgtcgcgatccatatagagcatttcggtacggaacagcccgacaccttccgcgccgttggcaaacgcgcctggcgcttccagagcggtgccgatattcgccgcaatatcaatacgcttgttatcacgggaataggccagctgcgcggcagcctgcgcctgttgtttttggcgtttatccgccagcgtctgcgcgacctgataataaccgctcaccgcgtcattcgggttaatcgccagcacgccgcactgggcgtcaagcactgcaggttgcccggcataacgggcaatcgcatccagcggcaagccactcagtaccgggatcgcgctggcacgggccagaatcagtgtatggctggtgcgcccggttttctccagaatcatgcccgcaagatttttcaaatcaaggctcaaaaactggcttggggttaaatcttcagccaccagaatggtcggtttttcaagcaccagcttgttgcgcggcttcagttccggccaggtgatatgcagcaactgttcgctgatatcgcgaatgtcgctaacacgttcgcgcagataatcgctggcagaggcagaaagtttggcgcaaacctgctccatattgctgatgatcgccgcccccagcccctgatgctgttctgtcatcaggcgacggatattgcctgcaaattcatcatcctgaatcaggctcaaatgggcgctgaggatagttttgctttcgccgtcacgctcacgcaattgctggttcagttgctcggcaagcgttgccaggctgtgctccagccgggtggaatcttgcgcactggcggggattgcccgataactgtcgaggctgtcgctttgtaacagggtcagcgtacccacgccgacgccgcttgccagcacattgccgtacagtaaatccgggttaaggcggcttaaactacgcggcagcggatgcgccgtcagttctgcctgcgtaggctgaacgctgtcgctgtcgataaagcgcacctggatgtactcttccagcacgcgccgcgcctgctcttcatcgctgccgctaatgttcaggctgcaactgtcattaaatagggtgccggtgccaatcagcgccaggctgcttttcgcatctgcctttgcgttctggcgatggttaataaaagtgatttcgctttgccactggctgcactgttctttaagttcccacgccggacgagcatgtagaccgttaggcaaaggacagagaaattgaatcgttaacataaccgctccgggttaatcaggagatcatctgaaatccgtcagttgaacaaccgtctcacgcgtaagacgttgaataagggcagataaaagttgctgcatctgcaaaatgtcgcggcaatcggcaatgcttgcggcgcaatgtccatggcgggttgctggccccatcaccactgtgggcacgccggtgccggttaagtgcaccgccccgccgtccgtgccgccgttgctgaacatatctgcctgcaacggcacgccaatttctgccgccacggtttcgacccaggcggtaagttttggcggcgcaatcaggctcttgtcgcttaacaccagcatcggcccgttaccaatctggcgatggttagccgcgccataatcaaagtttttcgcccagcaggcggtatcaagcacaatggcgacgtccgggctcaccgcgcgggtggcagtttgcccgccgcgtaatcccacctcttcgctggaacttgccaccagccacacttccgcaggtagttcggcgtcgtgcagttcgcgcagtaacgtcaccagcagatagcaaccgaggcggtcatcaaaggctttccccatcactcgctggtgagggagaacctgaaaagtggtatcaaacgtgacgcgatcgccgggacgaattcccgcctgcatcacttcgtcataggagcgcgcaccaatgtccacgcgcatggcgctgacgtcattcccctgccggtcgccgtcaagcaggcctggaattttgcactcttcacgggtggtgatgcgcaccggctgcagctggcgggcagccatgcgtacgttgccaaccggcagcacatcaatcgccccttcgcgggagatgctgcgcaccataaatcccacttcgtccatatgcgcacagatcatcaccttcggacctgtgctttcattcaggcggatcagcacgcttcccagaccatcaaatcgcacttctttttgcaggcgatccgcttcttccagcaggatctgccgcacttcctgttcgctggaggcgatcgcatctgcctcgctcaacgcttttaataggcttaaatccattatgcctctcccgtgagcaacactgttttcggcatggcgtagagcacttctgcgccttgcggggtaaccagcacaacatcttcgatgcgcacgcccccttgccctggcaaataaatccccggctccacggtcagtaacatgcctggctgtagcgtcgtggtgtcccgcggactaaaacgcggatcttcatgaacttcaatgccgatagcgtgaccggtgttatgaccgaaatagtcgccataacctgcttctgtaatgacccggcgcgcggcatcgtcaacctgctggcagcgcacgccggggcgaatcgcggagattgctgcgagctgtgcctgcaggacaatttgatagacgttaaacagcaggtgagattcggcgctcaccccttcgccattcaccagcaaggtgcgcgtcatatcagagcagtagccctgatacagcgcaccgaaatcgagagtgacaaactcgcccgctgcaacaatcttgtcgctggctttgccgtgcggcagcgccccacgccagccactggcgacaatggtgtcaaaagaggctttttctgcgccctgctggcgcataaaccactccagttcagcggctatctcgcgctcgctcatccccgcctgaataaagcggcgaatatgctctgcaccgcgatcagcaatcccacaggcgaggcggattttctccacctcctctggcgttttgatttgccgcagcacatccggcgtggcgctaaccagtttcgcattgagttcagactgccagcggtgcgcggtttcccaactcacctgctggccctcaaaaccgagcgtttgcaactgttcatcggcaatgatttgattgacgatagtggtaagcgtgttcgtcgcgtcaagcaaatgcagctggtagccttgcgcacgggcttccacctcaacgtaatagcggctatccaccagaatgtgcgcactttcacggctaatcaccacataaccacttccggtggagatccccagatgcggctgtttgttctgccgactggagagaagcactgcatccagttgttgcgccttaagccagtcgcgcaggctagcgagtaatgtcatctggattttccttcttacaggctatcgattaacaatttgcctttacggaacatcatcagacgcaggaacaccaccatcagcgcagttatgactgcccccagcgcgatccccgccatatagacgcccaggttagtgaccagcggccatgcccagatagcggactccgggaaccattgcactgcgcccagccagacagcggcggtactgccgacaatagcgccgaccatatagctcggaatggcggtgatggggctttccagcgcaaacggaatcgcaccctcactgatccccataaacgccaggaacatggcggtcttaccctgcggataaagttgagcgttgaacaggcgtttgccggttaaacgacggtcgataatggtcgccagccccagaccaatcggcggaataacgatagcgatagaacgagcggtgaccggtaatacgtggtcagtggtaaagctgaaggcaacaaaacctgcggctttgttgatcgggccaccaaggtcgattgctgtcgccgcggcgatccccattgcgtacatcagcgcgcccttctcacctgcggcagtcagcacagtacggataccgccgttgatccagccaccaaagggggtgatgacgtagtacatcgccagcatgacaaaaatggcggaaagaatcgggagcaaaaatgtggttttgaacgctaacaggaaatccggtaactggattttctggttcatccacttcacaaggtaaccggcaacgatagaaataatcagcgcaccaatgaaggtggacggcaccgggctagaggtcgcccattgcatagtgctgggatcgaagttcagcagttgcgtcggctgggtagacatcaacccgccgataaaaccagccgggaacgccagtttgccaccgatagagttcgccacaaaagcagcaaacatcggaatggcaaaaccaaacaacacgccgccgaaggactggctcagccaggcaaatttaagtaaggagaggtcgaaaccggagaatttcccgctattaagagcatccatgatgccgatctcagcaggaattttaagccagctataagcaatcagctggctgaaagcgaggatcacaccgcccataattaaggtcggcaccatgcgactaatcccactcatcacatgctgcgggagttcaccccagaagctggttttagaggcctgcggattcttaactgccgctgccgcaccggatgcgccaggcacaacggttgcactgcgttttttaatggccataacaattatccctgtcgaatattactgttgttcagaggcaatcatctcttcgatttctttgatgatgcccgcagcgtttttaattgcgtcctgcaaagtgatttcataaacgtcgcgactttcgaaacgttcgttatcttccggggtaactgccacggagtggatgatgatggtcgcttcggcgatatcctgcgccgtcaggcgattctggataccgtccgcgccctgggtttcaattttcacttcataaccggcttctaccgccgcttcttccagcgcctgagcggccataaaggtgtgagccaggcccatcgggcaggcacataaggcaatcagtttcttactcatcgttaattcctcgttcagtgatagttgacgagtgaaattatgaacgtgcaaaacaaatcgccgttaccagacaaataatgcatttactggagaattaatcccgctgtacggaagtgtgacgcaggtcgaccttgtgaggggacacaaagaaaaattgaataaactgtatgatttaaaagattatcgggagagttacctcccgatataaaaggaaggatttacagaatgtgacctaaggtctggcgtaaatgtgcaccggaaccgagaaggcccggattgtcatggacgatgagatacaccggaatatcatggacatattctttaaagcgccctttatcttcaaatgcggcacggaaaccggaggctttgaagaactcaaggaagcgcggcacgataccgcccgcaataaacacgccgccaaatgtcccgagattgagcgccagattgccgccaaaacggcccataatgacgcaaaacaggctcaatgcgcggcggcaatcggtgcagctgtcagccagcgcgcgttcggtaatatcttttggcttgagattttctggcaggcggttgtcagctttcacaattgcgcgatacaaattcaccagcccagggccagaaagcacgcgctccgcgctaacatgaccaatttccgcacgcaatatttcgaggataatggcctcttcttcactattcggcgcaaaatcaacgtgaccgccttcgcctggcaagcttacccaacgcttatcgacatggaccagatgcgcaaccccaagccccgttccggcaccgtaaaccgcaataggcttaccttcgaccggttctgcgccaccaaactgaatcagatgctcttttttcagcatcgggatcgccatgcttacagcggtaaaatcgttaataatttccagatggctaaaaccgagattctttttcatttcggcaatactgaacgcccaggtatggttggtcatcgccacccagtcaccggtaattgggcaagcgatggcaatacagccgtctttcacctcgaccttatgttcttcaagataaacgcgaatgaccgcttcgaggctggggtaatcaagcccactataggtcttagcctggctgatttcaccactggcaatatcacacagagcaagacgtgcgttggtgccgcccacatcaccgactaatgcatactttgtcattcttcaactgctccgctaaagtcaaaataattctttctcacactgtaaatacctgggggcataacaacaacgccggaaaggcaggctccctgtaaatatcgatctgggtcacacaattactttatcgtttcagcaccaattgcagcgatgcctttttgcaagctgggcaaactaagtatctgaccccgcataaggaatagaacacaggcggcactaacccggacgtagactgtattacaaaagcggcaaaaagcagagacaaaaaacccccgctttgcagcgagggttggaaatttggtggagctaagcgggatcgaaccgctgacctcttgcatgccatgcaagcgctctcccagctgagctatagccccacgatgcgtttacgtaccaagtttgctgggtgcaaaatttggtggagctaagcgggatcgaaccgctgacctcttgcatgccatgcaagcgctctcccagctgagctatagccccgtcacgtaaagcttgtcgagttgacgggcggcatcatatgaattccgcccgaatgtgtcaacggcaaattgcaacgtgtagtttcaatcgctgaaaaatcaggcaaatgaacaattttggaaaaccgctcgcattcagtagttattcatgtcacggtttcctgtaaagtggtgttataaaatgaactactaatagacccacatacattcagggaattgttatgttcaaggagaggatgacaccagatgaacttgccagactgaccggctatagccgccagaccattaataaatgggtacgcaaggaaggctggacaacgagtccaaaacctggcgtccagggtggcaaagcccgactggttcacgtcaatgaacaggttcgtgaatatattcgcaatgctgaacgtccagaaggtcagggagaagcgcctgccctttctggtgatgcgccgcttgaagtattgctggtgacactggcgaaagagatgacgccagttgaacaaaaacagtttacatccttgcttctgcgggaagggattatcggattgttacaacgcttagggattcgcgatagcaaataatatgaaaagattacgcaataaaatgaccaccgaagaactggctgaatgcctcggtgtggctaaacaaactgttaaccgttggatcagagaaaaaggctggaaaacggaaaaatttcccggcgtgaaaggcggtcgtgccagacttattctggtcgatacgcaagtttgcgagtttattcagaacacgccagccttccataacacaccaatgttgatggaagctgaagagagaattgctgaatacgctcctggagcacgcgccccggcgtatcgacaaatcatcaacgcgatagataatatgacagacattgagcaggaaaaagtcgcgcaatttttgagtcgtgaaggaattcgcaatttcctcgcccgtctcgatattgacgaaagtgcataaataaaaaacggcaggatattatctcctgccgtttatctttttacacgctaattactgctgattttcgcgttcagcaataaaatccagcgctttgttgatacgctcgatactgcgggtcttaccaattgcgtgaacggtaacatccagtgctggagactgccccgcaccggttacggcgacacgcagcggcataccaactttacccatacccacttccagctcatccgccgtcgcctgaatagcgtgatgaacgttttcagcggtccagtcagtaatcgcggccagtttgtcacgaaccacttccagcggctgacgcgctaccggacgcagatgttttttcgcggcgtcggcatcgaactcagcaaaatcttcgtagaaataacggcagctctgtgccatctctttcagcgtcttgcagcgttcgcccagcagtttcaccagatcagccagctgcgggccgttacgggtatcgatattttcctgctcaatgtgccactgtaagtgagtagcaacatactccggcggcagcgcgttaatgtagtgatggttcagccacagcagcttgtcggtgttgaacgcactggcagatttgctgacggcattcaaagtgaagtatttgatcatctcttcacgagtgaagatttcctgatcgccgtgggaccagcccagacgcaccagatagttcagcagtgcttctggcaaataaccgtcatcacgatactgcattacgctgactgccccgtgacgtttggacagttttttaccgtcatcgccattgatcatagaaacgtgcgcgtaaaccggcaccggcgctttcagggccttaagaatgttgatctggcgtggcgtgttgttgatatggtcttcgccacggataacgtgggtgatttccatatcccagtcatcgacaaccacacagaagttataggttggggaaccatcggtacggcggataataagatcgtccagttcctggttgctgaactcgatcggaccacggatctgatcgtcaaaaacaacagaaccttcctgcgggttagcaaaacgtacaacacacggttcatcatcagcatgatgctcatggctgtggcggcagcgaccgtcataacgcggcttctcacctttcgccatttgctcttcgcgcagcgcttccaggcgctctttagagcaatagcatttataagcagtgccctcttccagcatctgatcgatcaccgcgttgtagcgatcaaaacgtttggtctggtagtacggaccttcatcccactccaggctcagccagttcatgccatccataatggcttcgatagcttccggcgtggaacgctcaagatcggtgtcttcaatacgcagcacgaactcaccgccgtggttacgtgcaaaaagccaggagtaaagagcagtacgcgcgccgccaacgtgcagatagcctgttgggcttggcgcgaagcgagttttgattttcatgaaatggccttacgtttagaaagatgccgacaaccggcaaatcctggaaaaattaagtgggcgatattctatcactcccgcctgattcctcaatgtagttcgggtttctaccttacgcattattgttttcgttgacaaattgcgcaacacggtctgttttgcgatcatcttgcttaaatttacgacgaacgaacaatttctttagaaaatgcgttgactcattttgaactctccctataatgcgactccacacagcgggggtgattagctcagctgggagagcacctcccttacaaggagggggtcggcggttcgatcccgtcatcacccaccaactactttatgtagtctccgccgtgtagcaagaaattgagaagtgggtgattagctcagctgggagagcacctcccttacaaggagggggtcggcggttcgatcccgtcatcacccaccactttctcgccagctaaatttcttgtaaaaatgtgaagtaccgaagtgggtgattagctcagctgggagagcacctcccttacaaggagggggtcggcggttcgatcccgtcatcacccaccacttcgggtcgttagctcagttggtagagcagttgacttttaatcaattggtcgcaggttcgaatcctgcacgacccaccaatgtaaaaaagcgccctaaaggcgcttttttactatctgcgatactcaaagattcgaacctgcagcaggtttgagttgagcgcagcgaaacaacggagccgctcgtgctggcgacggcccgaagggcgagcgaagcgagtcatcctgcacgacccaccaatgtaaaaaagcgccctaaaggcgcttttttgctatctgcgatttgcgaaattgcctgatgcgcttcacttagcagactactatttccggcaattcctgtctcctcacttactgtgtcaatgcagccaacagcttaaccatcgcgggcgtcacctgctgtgtttcataaacaatatataaatctgcagggatgcgctgtttgagcggacggaaaatgacacctggccagttcatttgtgcgtagctgtccgctatcaatgtgataccaatgcccatactgaccatagcgagtaccgtttgcggttcattaacttcgcgaataacaaccggactaaatcccacctgctggcaaactcgctgcaaaaaatcccagtcagtgtaaacgggcggcattgtaacaaaatactcgtcacgtagcgcttccagcgggacggtggaaaaactactgagatgatgctcttcaggcatcgccaccagaaacgcgctttcatgcaaccgtaagctggtaaaaccagtcggtggttctgtcgccattcgccagatcccggcatcaagttcgcggcgttccagcaaggccatttgcatcgcgggcatcttttcgcgaaaaagaacgtcaacgttaggattttccctgaggaatcgccgcataaccgggcgcatccgtccccacattgccgttcccactacgccgagttcaatccgccctgcttctccccgacctatttgttcaatccgagccaatacattattagcattcaccagcaatcgacggctttcttccatcaagattttgcccgcgtgtgtcagtacgacgctgcggctatggcgaataaaaagctgcgtgccgagttgattttccagctctttaatatgaatgctgagcggaggctgagacatatttaaacgcgctgctgcgcggccaaaatgcaactcttccgctacggcaagaaaataacggagcaacttaagatctgttctgtatacgcgttccataattaagtgctccatataataaatacatcgtattaaattatcatggcataaagtatttcaccaccagatatccgacatacataaacacaatggataatatacccggtaatacatttggtacaggaataggcaagcgcacgattgtaaacaaagcaccaataccaaaaccaacgccggaagaaaataaaatatctttcactaattaacctttatcataaaagcagctctgaagagcagagccgcgaatccttttaatgagtcaccgctcgatgctttatcttttcagggtcatgattatatttaaacccaaagaaaaatatcactgcgagaaaaagagcatatcctgcaaacaccagccagatagtttgccagtcttttacgccatccacgctaaagtaatctactgccatgccactcagaatgctgccaacccatgcgccgacaccatttaccatggtcataaagagcccctgcgcgctggcacgaatgctggaatcaacttcctgttcgacaaatacgctaccagaaatattgaagaaatcgaatgcacagccataaacaatcatgctcagcagcagcaaaataaatccggttgtactcggatcgccataggcgaagaagccaaagcgcagcgtccaggccaccatactcatcagcatgacggttttaatgccaaatcgctttaaaaagaatgggatagtcagtataaagcccacttctgccatctgactaacactcagtaaaatggagggatatttcaccacaaaactgtcagcaaactccgggttacgggcgaaatcatgtaggaacggattaccaaaaacgttggtaatttgcagtaccgcacccagcatcatggcaaagaggaaaaagatggccatgcgtggatttttaaacagcacgaaggcatccagacccagcttgctggcaaggcttgtggtcgcttttttctccgcaaccggaatcttcggcaaagtcagcgcataagcgctcagcagcaaactcgcaccggacgcgatatacagctgcagactactcaattccagatgcagcaggcttactgcccacatcgcgacaatgaaccccaccgtaccaaaaacgcgaatgggcgggaaagcggtcaccgggtcaagccctgcctgggcaagacaggaataagagacgctgttgcttaacgcaatagtcggcataaacgccatcgcattgactaacatcacccaaaacatcatatccggatcagttacggatgccgcataaaaaagtacgcccgcacacaccaggtgacacagcatgtatgcacgttctgcgcgcagccatttgtctgcgatgatccccattataccaggcataataatcgcggcgatccctttggaactgtaaaccatgccaacattagcgccggtgaaatgaagagtattaatcatgtaagagccgagggtaaccagccagctcccccagataaaatattgcaaaaaggacattacctttaagcgcatcgcgatgctcataatcgtttccttgtcgcatcatttggcctcacccgcgaggccgtttcttattgtttttctcaggcaattttgcgcagaaagccacaaataaggttgatgaagttctgcttagagagctccgcagccgccagcgtttgcgcatgactcaatttcacatcgcttaaaccttccgccatattggtaatcgcagagaccgcaacgactttaaggtcgcaatggcgagcactaataacctcaggcaccacagacataccaacaacatccccaccaataatttgcatcatgcgaatttccgccgcagtctcgaaattcggccccggatagctgacgaacacgccctccgtcagagggaaaccctcttctttcgccactttttgtaacagtgcgcggtattccgcatcgtaggcatttgccagactgaagaagcgctctccaaaacgatcatcgttaagacccaccatcggcgtaccgggcatggtgttgatatgatctttcaatgcgaccaggctgcctgcccccacttccggacgcaggctgcctgccgcattggtgcagaacagtagctcgcagcccagcagcttaaaggtacgaattgcgtcagtcataatggtcattccacgaccttcgtagaaatgtccgcgacctttcatacataccaccggtacgccctggagatggcccagcactaactcccccgcatgaccatgtaccgtacttaccgggaagcccggcagcttttcgtaggaaattgcgacagcgttctcaatctgatcggccagcgcgccgagcccggaacctaaaataaaggccactcgtggcgtgaaatcaggtttataagtcttgataatatctatgcaaaacagcgggttatgagaaaattgaacctgagacatacatatcctttttctgtagggtggaatctaacgcctttttatagcgaggttgtcccggctcttaccaatacacttttctcacgcattcaatagcgattcgatatcgatggatttatatcttttctctattaatccacggtaaaaactgtattggcgatattaattcctttgcattaacaatatgtcgtttttagcaaaccactttattaagcaatctactaataacgatcggcatagggaattatgctatgaaaaaacatcttttaactctgacactttcctctatattagcgatacctgttgtatctcatgcagaatttaaaggcggttttgcagatatcggcgtgcattatctggactggaccagccggactaccgaaaaaagcagcaccaaaagtcacaaagatgattttggttatcttgaatttgaaggtggcgctaactttagttggggagaaatgtacgggttcttcgactgggaaaacttctataacggtcgccataataaaccaggtagcgagcagcgttatacctttaaaaataccaaccgtatttacctgggtgacaccggatttaatctctacttgcatgcgtatggcacctacggttctgcgaatcgcgtgaatttccacgacgatatgttcctgtacggtatcggctacaatttcaccggcagcggttggtggttcaaaccgttctttgctaagcgttatacagatcaaacctattacactggcgacaacggctatgtcgccggctgggttgcaggttacaactttatgctgggcagcgagaaattcactcttaccaactggaacgagtacgagtttgaccgtgacgctacctatgcagcgggtaatggcggtaaagaagggctgaatggcgcagttgcactgtggtggaatgcaacaagtcacattactacggggattcagtatcgatatgcggatgacaaactgggcgaagatttttaccaggatgcgataatctactccatcaaatttaacttctgattgattactgccggggctcccggcagtatgaattcactttatatctgatacaacggatccccttcccgcccagccattagcgcattgccctggtctcgtaccacgtcccataaagcttcagcggcggtggaaagactacggttcttcctgcgcaccagcatcaactggcgttcaacaaccggcgtaatgcgctttaccaccagtgggctaccttcaggcaatggtagcgccagtgcgggaagaatactgatgccgatgcctgcggctaccatcgggaacagcgtcgccggatgtccaatctcctgcacaatattcgcctgaataccattgcgcgccagcgctgcgtcaatcagcggtcggctgccactcgcgtaatcctgcaacaccaatttcgctccctgtaatgcctgccagggtacataatcttccacggccaaagcgctatcgcgatggcaaagcagaaagaaaggctcggaaagaatcgcttcacattgcagatcgcccactgggcctggatcgatgacgatgccaaaatcgacatctccctggcgaatactttccattacccactgctgcggacgatcgtgcaggacaaactgaatatctggatagcggcgatggctttcagcaatgcattgcggaataagatgcgcggaaatggtctggctggcagcgacccgaacttttccgctcagttgttgccccatacgcccggtatcgcgcaacgtgctgttcagttcatccagcagtcgctcaagacgcaaagccagctgctgccctgcatctgtaagcaccacttcacgcgtggttctgtccagcaggcgaacaccagtatgattttccagttccttcacactgtgactcactgcgctctggctcaggccgatacgctctcctgcacgactaaaacttttctcctgcgctactgtgacgaaaacctttaattgttttaaagaataattcatctgttttcttcatgaatggatgcaataaatcaattttatttctcaaactggaagaagcacaatagaaccatcgatcatctggagtctttatgaaactttttcgtatcctcgatcctttcaccttaaccctgatcacggtggtgttgctggcctctttctttccggccagaggcgatttcgtccccttctttgaaaatctgaccaccgcagctattgccctgctgttctttatgcacggcgcgaagttgagccgtgaggcgattattgctggcggtggtcactggcgactgcatttgtgggtaatgtgcagcaccttcgtgctgtttccgattctgggtgtactgtttgcctggtggaaaccggtaaatgtcgacccgatgctctactccggttttctctacttgtgcattctcccggctaccgtgcagtctgcaatcgccttcacgagtatggcgggcggtaacgtcgcggcagcggtttgttctgcgagcgcatccagcctgctggggattttccttagtccattgctggttggtctggtgatgaatgttcacggtgcagggggcagccttgagcaggtcggtaaaattatgctgcaactgctgctgccgtttgtgttggggcatctttcccggccgtggattggtgactgggtgagccgcaataaaaaatggattgcgaaaactgaccagacgtccattctgttggtggtttatacagcgttcagcgaagccgtcgttaatggtatctggcataaagttggctggggaagtttgctgtttatcgtggtggtcagctgcgttcttctggctatcgtgattgtagttaacgtctttatggcacgccgactgagcttcaataaggcagatgaaattactatcgtcttttgtggtagcaaaaagagtctggcaaatggcatcccgatggcaaacattctgttccccacaagcgtgatcggtatgatggtgctgcccctgatgattttccatcagatccaattgatggtctgtgcggtgctggcgcgtcgatacaaacgccagaccgaacagttacaggcgcagcaggaaagcagcgccgataaagcttaaagcggacgcttcaggggctggaccagttgcgtcagcccctcggttttaatcagcagcgtgatttgcattagctcaccgagcttccctgccgggaactcatctttgcgggcaaaccacagcagatactcctccggcaggtcgattaagcgacgccctttgtatttgccaaacggcattatcgtattggctatttcaatcagctgctctttttccatctcagctacccagcaaacgcagcatttccgcttcgtcgatgacttcaatgcccagttcctgcgccttcgccagtttagatcctgcagcttcacccgctatcaccagatcggttttcttgctcacgctgcccgcgactttcgcgcccagttcgaccagtcgagctttagcgtcatcacggctcatctggcttaagctgcccgtaagcaccacggttttaccagcaaacgggctgtcaatctcttccgcgttgataacgatcggcgcaggccagtgaacaccttccgccaacagctcgctgatgacattgcggttgctttcttcggcaaagaagttgtgaacgtgggatgcaacgacaatgccaacatcaggcaccttttgcagctcttcaatgctagcggcttccagcgcttccagcgtgccgaaatatgccgccagacctgctgcggtggcctcgccgacttcacggatgccaagtgcatagaggaagcgagcaaaggtggtttctttcgctttttccagcgcgttaaccacgttttgtgcgctttttggccccatacgctccagtccggtcagtttgcctgcggtgagtttgaacagatctgccggagtatggacatattctttttcaaccagctgatcgatgattttgtcgcccattccgtcaacatccatcgcacggcgggaaacaaagtgtttcaggctctctttacgctgcgcaccgcaaatcaggccaccggtacagcgggcaaccgcttcaccttccacacgctcaacgtcagaaccacataccggacaatgcgtcgggaatacaacctcacgggtatcttccgggcgttcagaaagcacgacgttaaccacctgcgggatcacgtcgccagcgcggcgaatcaccactttatcgccaatgcgtaaaccaagacgttcgatttcatccgcattgtgtaaggttgcgttactcaccagcacgcctgcaacatggacaggttccagacgcgcaacaggcgtaatcgcgccagtacgcccaacctgaaactcgacgtcacgcacaaaggtcatctgctcctgcgccgggaatttaaacgctaccgcccagcgcggggcacgcgcgacaaagccaagctgctcctgctgtgccagactgttgaccttaatcaccacgccgtcgatatcaaagcccagcgtcgggcggtcttcttccactttgtgatagaacgccagcacttcttccgcgctttcacaaagcgttacccgatcgctgaccggcaacccccactttttaaattgcagtaaacggccaagatgagtatccggcagctcgccaccttccagaacaccaacgccatagcagaaaaaagtgagcggtcgcttcgctgtaatacgcggatcaagctgacgcagactaccagctgccgcattacgtgggttagcaaacactttcccgcccgtgcgtcgcgcatcttcgttaatcttttcgaaccccgcctgcggcaggaacacttcaccacgcacttccagacgcgccgggatattctctccgtgcagcttcagcggaatggcgcgaatagtacgcacattagacgtgatatcttccccggtggtgccatcgccacgggtcgcggcactgactaaaacgccattttcatacagaatactgacggcaagaccatccagcttcagctcacagcaccaggtgactttctcgttgtttttcagacggtcctgcacacgtttgttgaaagcaagaaagctttcttcatcaaaaacgttatccagactcagcattggtacttcatggcgtatctggctgaaagccgccagcggcgcagcgcctacacgttgagtagggctatcaggcgtaatcagttctggatgtttggtttccagctcgcgcagttcgcgcatcagcctgtcgtattcagcgtcgggaatttccggcgcatccatcacatgataaagatattcatgatggcgaagcgtcgttcgcagttctgtcagttgttgttcgatactttccatatcgcaccatcaatgctaaaaacccccgacaagcgggggttcgaagaggagttaatttgccttaagtgtatcaggcgttggcgtctttgacttcgcggatgatgtcctggtactcgcgcaatttctgcggagtcatcatacggcgctgatcgtcaagcacgacaccgcccacttcatcggcaatatgctgcgcagattgcagcatcagcttgaagttctgcagctcgtcaccgtaagacggtacctgcataaagatagtgacacccggagtagtgaaatccttcatttcaggatcaaaggttcccggtttcaccatattcgccaggctgaataacgccgggccgctgccatccgggctaagatgacgatggtaaatattcatatcgccaaaaatgaagcccgcttgttgaatgctgttaagaagcagttcaccgtttagctcgctaccgtgatgcgccgcgacgttcatgataatcaccgcttctttgcgcttcggtttatccataactggagcaggttccgctacaggctcaggctgtggtgccgctacgggttctgcaggctggaaagcctgttgtgccggttgcggtgcactatgcacaggctgcggcgctggcgcgacctgtgggctaactggctgctgcaacggctgttcaggctgcggctgataggcaggctgctgcaccggctgcgctggatgcggagcatgttgcggcggtacctgcgcttcaggcggctgctggaccggttgacgcggctgcgcagacgcataaggcggttggtactggtgttgcgggctcggacgagcagcctcatgctcctgagcgttagccggggcatgattcacgcggtgaacacgaacctcaccaacgccctcatcatcttcgacatcctcgtcataagaatcgtcgtcacgtttactcttcattcgttttaatggccgatcgcggaacatagaagatcgttctttacggctggtccagaaaccatgtaccagtaaagcgattatggcgatcgcgccaacaatgattaatatcagacgcaaatcctgcatcattatattctctgttgttctaacaccttgccaccacggcaaacatttactcactaagagtatttgccgattacctcaagtgcaagtgcactattaactttcacagcacaaagatagatgaaatcgtgctttttgctgttttttcgaacatatcctaactgtccattgcgcaattacccggtaaaatacgcagaattttcctgggattggtcaaaaggagctcatcctgattatggttagtagtttcacatctgccccacgcagcggtttttactattttgcgcaaggctggaagctcgtcagccaacctgggattcggcgtttcgttattttaccgctgctggtcaatattttgttgatggggggcgcattctggtggctctttacacagctcgatgtctggatcccgactctcatgagttacgttccggactggctacaatggctgagttatctgttgtggcctctggctgtcatctctgtgctgttagtgtttggctatttcttctccacgattgctaactggattgccgctccgtttaacggtttattggctgaacaactggaagcacgattgactggcgctacaccgccagataccgggattttcggtatcatgaaagatgtgccgcgaatcatgaaacgcgaatggcaaaaatttgcctggtatctgccgcgcgcaattgtattactaattctttacttcatccctggtattgggcaaaccgtcgcgccggtactgtggttcctgtttagcgcctggatgttagccatccagtattgcgattaccccttcgataaccacaaagtgccgtttaaagagatgcgcaccgccctgcgcacacgcaaaatcaccaatatgcagtttggtgctttaaccagcctgtttacgatgatcccgctgcttaatctgttcatcatgcccgttgccgtttgtggcgcgacggcgatgtgggtcgattgctatcgcgataaacacgcgatgtggcggtaacaatctaccggttattttgtaaaccgtttgtgtgaaacaggggtggcttatgccgccccttattccatcttgcatgtcattatttcccttctgtatatagatatgctaaatccttacttccgcatattctctgagcgggtatgctacctgttgtatcccaatttcatacagttaaggacaggccatgagtaagatttttgaagataacagcctgactatcggtcacacgccgctggttcgcctgaatcgcatcggtaacggacgcattctggcgaaggtggaatctcgtaaccccagcttcagcgttaagtgccgtatcggtgccaacatgatttgggatgccgaaaagcgcggcgtgctgaaaccaggcgttgaactggttgaaccgaccagcggtaataccgggattgcactggcctatgtagctgccgctcgcggttacaaactcaccctgaccatgccagaaaccatgagtattgaacgccgcaagctgctgaaagcgttaggtgcaaacctggtgctgacggaaggtgctaaaggcatgaaaggcgcaatccaaaaagcagaagaaattgtcgccagcaatccagagaaatacctgctgctgcaacaattcagcaatccggcaaaccctgaaattcacgaaaagaccaccggtccggagatatgggaagataccgacggtcaggttgatgtatttattgctggcgttgggactggcggtacgctgactggcgtcagccgctacattaaaggcaccaaaggcaagaccgatcttatctctgtcgccgttgagccaaccgattctccagttatcgcccaggcgctggcaggtgaagagattaaacctggcccgcataaaattcagggtattggcgctggttttatcccggctaacctcgatctcaagctggtcgataaagtcattggcatcaccaatgaagaagcgatttctaccgcgcgtcgtctgatggaagaagaaggtattcttgcaggtatctcttctggagcagctgttgccgcggcgttgaaactacaagaagatgaaagctttaccaacaagaatattgtggttattctaccaagtagcggtgagcgttatttaagcaccgcattgtttgccgatctcttcactgagaaagaattgcaacagtaatgccagcttgttaaaaatgcgtaaaaaagcacctttttaggtgcttttttgtggcctgcttcaaactttcgcccctcctggcattgattcagcctgtcggaactggtatttaaccagactaattattttgatgcgcgaaattaatcgttacaggaaaagccaaagctgaatcgattttatgatttggttcaattcttcctttagcggcataatgtttaatgacgtacgaaacgtcagcggtcaacacccgccagcaatggactgtattgcgctcttcgtgcgtcgcgtctgttaaaaactggcgctaacaatacaggctaaagtcgaaccgccaggctagactttagttccacaacactaaacctataagttggggaaatacaatgttccagcaagaagttaccattaccgctccgaacggtctgcacacccgccctgctgcccagtttgtaaaagaagctaagggcttcacttctgaaattactgtgacttccaacggcaaaagcgccagcgcgaaaagcctgtttaaactgcagactctgggcctgactcaaggtaccgttgtgactatctccgcagaaggcgaagacgagcagaaagcggttgaacatctggttaaactgatggcggaactcgagtaatttcccgggttcttttaaaaatcagtcacaagtaaggtagggttatgattagtggcattttagcatccccgggtatcgctttcggtaaagctctgcttctgaaagaagacgaaattgtcattgaccggaaaaaaatttctgccgaccaggttgatcaggaagttgaacgttttctgagcggtcgtgccaaggcaagtgcccagctggaaacgatcaaaacgaaagctggtgaaacgttcggtgaagaaaaagaagccatctttgaagggcatattatgctgctcgaagatgaggagctggagcaggaaatcatagccctgattaaagataagcacatgacagctgacgcagctgctcatgaagttatcgaaggtcaggcttctgccctggaagagctggatgatgaatacctgaaagaacgtgcggctgacgtacgtgatatcggtaagcgcctgctgcgcaacatcctgggcctgaagattatcgacctgagcgccattcaggatgaagtcattctggttgccgctgacctgacgccgtccgaaaccgcacagctgaacctgaagaaggtgctgggtttcatcaccgacgcgggtggccgtacttcccacacctctatcatggcgcgttctctggaactacctgctatcgtgggtaccggtagcgtcacctctcaggtgaaaaatgacgactatctgattctggatgccgtaaataatcaggtttacgtcaatccaaccaacgaagttattgataaaatgcgcgctgttcaggagcaagtggcttctgaaaaagcagagcttgctaaactgaaagatctgccagctattacgctggacggtcaccaggtagaagtatgcgctaacattggtacggttcgtgacgttgaaggtgcagagcgtaacggcgctgaaggcgttggtctgtatcgtactgagttcctgttcatggaccgcgacgcactgcccactgaagaagaacagtttgctgcttacaaagcagtggctgaagcgtgtggcagccaagcggttatcgttcgtaccatggacatcggcggcgacaaagagctgccatacatgaacttcccgaaagaagagaacccgttcctcggctggcgcgctatccgtatcgcgatggatcgtagagagatcctgcgcgatcagctccgcgctatcctgcgtgccagcgctttcggtaaattgcgcattatgttcccgatgatcatctctgttgaagaagtgcgtgcactgcgcaaagagatcgaaatctacaaacaggaactgcgcgacgaaggtaaagcgtttgacgagagtattgaaatcggcgtaatggtggaaacaccggctgccgcaacaattgcacgtcatttagccaaagaagttgatttctttagtatcggcaccaatgatttaacgcagtacactctggcagttgaccgtggtaatgatatgattagtcacctttaccagccaatgagtccgtccgtgctgaacttgatcaagcaagttattgatgcttctcatgctgaaggcaaatggactggcatgtgtggtgagcttgctggcgatgaacgtgctacacttctgttgctggggatgggtctggacgaattctctatgagcgccatttctatcccgcgcattaagaagattatccgtaacacgaacttcgaagatgcgaaggtgttagcagagcaggctcttgctcaaccgacaacggacgagttaatgacgctggttaacaagttcattgaagaaaaaacaatctgctaatccacgagatgcggcccaatttactgcttaggagaagatcatgggtttgttcgataaactgaaatctctggtttccgacgacaagaaggataccggaactattgagatcattgctccgctctctggcgagatcgtcaatatcgaagacgtgccggatgtcgtttttgcggaaaaaatcgttggtgatggtattgctatcaaaccaacgggtaacaaaatggtcgcgccagtagacggcaccattggtaaaatctttgaaaccaaccacgcattctctatcgaatctgatagcggcgttgaactgttcgtccacttcggtatcgacaccgttgaactgaaaggcgaaggcttcaagcgtattgctgaagaaggtcagcgcgtgaaagttggcgatactgtcattgaatttgatctgccgctgctggaagagaaagccaagtctaccctgactccggttgttatctccaacatggacgaaatcaaagaactgatcaaactgtccggtagcgtaaccgtgggtgaaaccccggttatccgcatcaagaagtaattcttgccgcagtgaaaaatggcgcccatcggcgccatttttttatgcttccgccagcggcggcaaaatcaattcatcgctctcatgctgctgggtgtagcgcatcacttccagtacgcgcaaccccgctcggtgcactgcatcggttaacgccttccctttcagcaagccactgatgagctgagcacaaaacaggtcgccagtccctttcaggtcggtttttacccgactatgggaaatgacattcacgctgtcggcagtgaccaccacaacctgcatctcctgattttcttcattaccggaggcgctggtaaccaccacccattttaatgtgtcactaagcagactttttgcggcagcaatggcactgtcgagatcgcggcaatttttaccggtcaggatttccaactcaaagatattgggggtaattccctgcgccagcggcagtaaatattgtcgatacgcttcgggaaggtcaggtttgacataaattccgctatcaatatcgccaatcaccggatcgaccatgatcaataggtcaggatggtctttgcgtagcgcagtcagccactcggcaaggattttgatttggcttgccgttcccatatagcccgtggttacagcacgaagttggcgcagcgcatcacgctcctgaagcgcacgcaaatagccgctaaaccattcgtccggaatcgcaccaccgtagaaagtgtcataatgcggcgtattgctcagcaataccgtcggcacggcaaagacattcaggccgttctgtttgatagcaggcacggcaatgctgttgcccacgctgccgtaaaccacctggctctgcacggcgacgatatccgcctgcagtgccctactcttatcgttaaacaacaacaaactactcatttaattttttctccttgccgatgatcctcatcgtaatccaaccgaaactttacctgattctggcagtcaaatcggctatcacaaaacaaggataaggtaattcaatgaagaaaatcatttgtctggtcattacactactaatgacactccccgtttacgcgaagttaactgcccatgaagaagcccgcatcaacgccatgctggagggattagcacagaaaaaggatttgatatttgtgcgcaacggtgatgaacatacctgctatgaagcggtttctcatctgcgtctgaagctcggcaatacccgtaaccgcattgacactgccgagcagtttattgataaggttgctagcagcagtagcattactgggaagccgtatattgtgaagatccccggtaagagcgatgagaacgcacagccttttttacatgcgttaattgcgcagacggataaaacggtgcctgcggaaggaaattaatccgctttgggaaggcatttacaggaggtaacatgaaaaaacgctttatttatcacgatgaaaaaagcaataaattttggtggatagattacgaaggggatagtttagctgtcaactatggcaaggtaggtagtattggtaaattccagacaaaagagttcgataatgaagaacagtgtctgaaagaagccagtaaattgattgccgcaaaaatgaagaaaggctatcaagaagatccaaagtttaacttcatggatcgctactattttgatgatgaagaaattgggttacatgttaaaacgagtcacccaaacttccagtgccattttactgatccactttatatgtgttgctgggatgaagaatctccttttggcagcgatgaaggtgctgatgctctaaacgttcttgaaaatagcctccgtaaagagccggatctggactgtgctgatttccctcaaatgttaattgaaactatgtggggtatgaaatacatcgctatggacagtattcttgaagaggatgttcgtgcgcaattactagtcgatgaaatgagcactatccagagcaatatgattacctacgcaactgcattcggtcagattaaagtcatgggtaaaatctcccataaacttaaaaagatgggactcaatgcactagcgcgtcatcagcttaccgcaaaaattcttcaatggggtgacggtcaggacagtccaatacttcaaaaaatgattgatgaccttacggcgtttcctcacgaaaattaaatactgcatttgtcggcagcaacaactgttaaaaaagtgcgctttgtttatgccggatgcggcgtaaacgccttatccggcctacaaaatcgtgctaattcaatatattgcagaaaccttgtaggcctgataagcgtagcgcatcaggcagttttgcgtttgtcatcagtctccgatgctattaatccttaaatccccgccccctggctaaaatgctcttccccaaacaccccggtagaaaggtagcgatcgccacgatcgcagatgatcgccaccaccaccgcgtcagggttagcttttgccacccgcagtgctccggcaaccgcgccgccggagctgacgccacagaatattccttcccgcaccgccagttcgcgcatggtgttttccgcatcgcgctgatgaatatccagcacctcatccaccagagaagcgttgaaaatccccggcagatattccgtaggccagcggcgaatgccgggaatgctgctgccctcttccggttgcaggccgacaatggtcaccggtttggattgttcgcgcataaagcgactgacgccggtgatagtgccggtcgtccccatgctggagacaaaatgagtgatgcgcccgccggtttgctgccagatttccggcccagtggtggtgtaatgcgcataagggttatcgggattattgaactgatcgagcagctttccttcgccacgattcgccatctccagcgccagatcgcgcgcaccttccatgccctgctctttggtgacaagaatcagttccgcaccataagcacgcatcgccgcacggcgttcctggctcatgttgtcgggcatcagcaatttcatgcgatagcctttcagcgcggcaatcattgccagcgcaatgccggtgttaccactggtggcttcgattaagacatcacccggtttaatttccccgcgcttttccgcctcgacgatcatgctaagtgccgcacgatctttcacgctacctgccgggttattgccttccagttttaaccacacttcactgccgttatccggccccattcgctgcaacttcaccagaggcgtattgcctattgtttgttctaatgtactcacgatctctatccatacgtggtgttgcctgatgcgacgcttgcgcgtcttatcaggtctacaggttacaaaccttgccattaaaaagcccggatcgcgggaagcgcctccgggcgtttaacattcactcaacctatcaggcgctttgtgcgagagcaagttcctcatcgcgggtttcgatacgctcgtcgccgttatacagccgcgcatgttgcagaccaacgaataaacgctcgccacgctgcggggcatcgtcgccatgcatcacgaccgtcagcggttcgttgtaccaccccagcggctgcaccactaattgggtgtagtgacctttcgggctggcttccagtacctgtaccggcagcgggctatcgaggctggtacggcggctgatatccacttcccaagggcgcaggaagagatccaccggcccctgatacgcaggtgtgtagcccagcggccagcgatgcgcgccaacatggaactgcccgccgcgaatggttccctgcaggcggttcacttcgcccataaattcgagcacaaaacggatcgccggttcgcgccatacctgatccggcgcgtcagcctgttcaatattgccctggctcatcacaactacacgatcagctacttcggtcgcttcttcctgatcgtgggtcacaaaaacgctggtgaattttagttcttcatggagttgacgcagccagcgacgcagctctttacgcacctgcgcatccagcgcgccaaacggttcatcaagcagcagaatttgcggttccacagccagcgcgcgcgccagcgccacgcgctgtttctggccgccggaaagctgcgccggataacgatccgccagatgggcaagctggaccatttccagcaattttgtcactttcgctttgatggctgcggcattcgggcgctcgcgacgcggcagcaccgtcaggccaaaagcgatattgtcgaacaccgtcatatggcggaacagcgcgtaatgctggaacacgaaaccgactttacgatcacgtgcgtgcaggcggctcacgtcggtgccgtggaagcgaatatgcccgctggtttgatgctccagcccggcgataatgcgcagcagcgtggttttcccggaaccggacggccccagcaacgcgaccatctgaccactaggaatatccagactgatatcgttcagcacctgggtgcgaccaaagctcttcttaatattggcaatctcaatgctcatgatgttcctcctgctgtgcgcgtttttcctgattctccaggcgccactgcaacatactttttaaaaacagggtgataatcgccatcagcgttaacagcgccgcagcggtaaaggagccgacggtgttgtagtcctgctccagcaattcaatctgtaacggcaggctcagggtttcgccgcgaatgctgccggaaaccacgctcaccgcgccaaactcgccaattgcgcgggcgttggtcaacaccacgccataaagcagcgcccagcggatgttcggtaatgtgacgcgacggaacatctgccagccggacgcgccaagcaaaatcgccgcttcgtcttcctggctgccctggcttaacatcaccggcaccagttcgcgcaccacaaacggacacgtcacgaagatggtgaccagcaccattcccggccaggagaacataatttgcaggttatgctcgtcgagccaaccgccgagcgggccgttagagccgtagaacagcaaatacaccagaccggcaaccaccgggcttacggcaaacggaatgtccagtagcgtcagcagtaactggcgtccagggaagttaaagcgcgtcaccagccaggccagcagaatgccgaacaccaggtttaccggtacggcaatcagcgcgatcatcaccgtcagccagatggcgtgcagcatgtccggatcggccagattctgtaaaaccggcatcagccccttgctgaatgcctgcacgaagatgtaaatcatcggcaccagcaggatgaacgcgctaaccagcatcccgatgccaatcagaaaccatttgccccagttaatcgggcgcgcgtcataacgcttcaattgggtaacttccgccattaatgacctaccacacgccgaccaaagcgactttgcagagtgttaatactgaacagcagcagcagagatgccgcgaggatcacgctagcaatcgcgctcgctgccgggtaatcaaactcctgtaagcgcacaaaaatcatcaggctcgtcacttccgtcttccacgcgatatttccggcgataaaaatcaccgcgccaaattcaccaagactacgggtaaagctcagcgccacgcccgccaccagcgccggagaaagctccggcagcaccactttgcagaaactctgccagcgcgttgcaccaagcgtttccgccgcttcttcatattccgggcctaactcttccagcaccggctgcacggtacgcaccacaaacggaatgctggtaaaggccatagccaccgcaatccccagccatgtataggtgactttgatatcaaacttcgccagccattcaccgtaaaaaccgtttacggaaaagaggctggccagcgttaaaccggcgacagccgttggcagcgcaaagggtaaatccatcagcgcatcaagcagcgtgcggcctgggaagcgatagcgggttaggatccacgccatcagcagaccgaaaacgccgttaaaaatgcttgccacaaacgcgctcagcagcgttactttgtaggccgcgaccacctgcgggttggtgatcacctcccagtactgcgcccagctcatctgggccagttgcatcaccagcgcggagagcggcagcagcaaaatcaggcacacaaacagcagactggtgccgaggcttaaggtaaagcccggcagcacgcgtctggaggagacagcaaacatcagttacgccccgccgctaacagcttgtctaactcgccgccgctggtgaagtgggttttcatcacttccggccaggagccaaatttgtcttccacgcggaacagctcggtctgcgggaatttgtctttcagtttgtccatcacctccgggttattcacgcggtagtaatagtcggtgatgatggtttgcgcctgcgggctatagagccagttcagataggctttggcggctttttccgtaccgttggcctgcacgtttttatcaacccacgccaccgggaattccgccagaatgttggttttcggaatcaccacttcaaagccctgcgcttcatactgtttacggatgttgttcacttcgctttcgaagctaatcagcacatcgcccaggccgcgctcggcaaaagtggtggtcgcgccacgaccgccagtatcgaacacttcaacgtttttcaggaactgggtcataaactgttcggttttgcctttgtcaccaccgtcagctttatccgctgcgccccatgccgccagataggtataacgcgcgttaccgctcgttttcgggttcgggaaaatcagcttcacgtcggagcgcaccaggtcgttccaatcgtggatattcttcgggttacccttacgcaccaggaagcccatggtggagtagaacgggctgctattattcggcaggcggctctgccagtcggccgggatcagcttgcctttatcgtgcaggatttgtacgtcggtcacctggttataagtgacaacgtcggcttttaagccctgtaaaatcgccagcgcctgtttactactcccggcatgagattgttttatcgtcagtttgtcgccgccgttatcttttgcccattgttgctcaaacggcggattcagggcggcaaacagctcgcgggagacgtcataagaactgttcagcagttccgttgcctgtacatggcccgccagcagcagagaagcgaccagcgcgagactgttctttttcagtaagttaacggccattgcgcacccttataaatttaatgactttctaatagccatcatatttataacggacgtgaaaggagtaacggttttatataccgtttggtgatttggaagttgaaaagggaataagaacttggttcaacaggcgtaattgttgcagtcagtttggacacgaacagcgcggagaaaccggagcgtacacatagtacgtgaggatttcgagcactgcccggggccaaaatgacaaataaaatagcctggtgaacttagttcaagacgaaatcctccccacaaatgcagggaggaaacagaggtgaatcagataccgacgctaaccgtctccggcagtgtgctgccgccatcaatcacattctgtgtaccggttaaatagctggattcatcgcttgcgaggaaggccgccagttcgccgacttccagcggatcggcgaggcgacgcatcgggattgctttcgccatttcagtcagcacgctctctggatcttccgggttgctctggcgggcaatgctttccgccattggtgtgcgcacgtatcccgggcaaatggcgttaacgcgaataccagactgcgcgtactccaccgccaggctttttgtcaggccaacaatcgccgctttcgttaaggcgtacgccgtttcgccaggatcggccaccatatcaccagtgacactagacatcatcacaatgcgaccatctttgcgggcaatcatctccggcagcaccgccttcgtgacgttccatacgcctttaatattgatgtcaatatggaaatcgcgatcgtcatcgctcatatcgaggaaactgcccagacgacaaacgcctgcgttattcaccaggatatcaatgcgcccttctttttccttcgcgcgtttgatagctgcggctacgctcgccgggtcacgcacatcggcgacaaccgccgtacagcgatgaccacgaccacacagttcgtccgccagcttttcgatctcaggggagatatccagcaagattaggttcgcgccatgacgtgcaaaagttctggcaattccttcgccaattccctgcaatgcgcccgtaatcagtgctgtcttgcccgtgagtttacccattttaatgctctccttgttaatacagagcgttacactccattccctctgaaaatacaggataaacaaaatattgctgcggatcagctcactaattcaggaaaatctcaatccagtcgctgctttatgcatcatttcaggcgttgtgttagctcactgctgcgctgaatcattttcaaactctccacatcattgagttgcacaaggccaacaaacagtaaatcggtaacagaattttgcgccgtgcgggtagacatgctgctgctacgccattcggtttctccggaaacggtatcgagggtgaaatgcgccagccgccgcagcggagagtcagtcagagaagtaatggcaatcaccgttgccccctgctttcgtgccgcttctgcgcacaagacaatctcttttttactgccgctgtaagagatagcgatttgtacatcgccttttttcaacgcctgagaaacggtggcttgtacgtgcgtgtcggcttcgcaggccacgcgatagccaattttcatcagtttgaagctcagatcgcgccccaccagcgcgcttccgcccaggcccgttatctggataaacggtgctttactgatgacctcaatgattttttgcagccgcgcgtaatcgagcaacgcgcaggtttgctccagcgccagctctttttcgcgattcagtttgcgcgcgatcacttccaggctatcatcactggtaatgctactgtgcaggtgcagtgccgtggcattcgttttctcccggctggcactgtattcgcctattaacgccatacgcaattcagtaaatccttgcgcgccgagtttttgggcaaatttcactatgctgctctggctaatgccgagctgtttcgccatctgccgactagaaacggattgcagctcactcacgttggcctgcagaaagtcagcgattttttgctcgttttcggtgaattcactccccgcattgcttattttcgtcaggtacaacatcttccactctcctgggctggcagcataaattccgcttaagttcttatgacgctcttcacactctgcgagtgtagactcaatgattcctttaagcctgtcaattcgggatatatgattccatacatctgcaattatttgatcgtaaatagtaaggtcaccaccgatgcaatttgaaaagatgattactgaaggcagcaacaccgccagcgctgaaattgaccgcgtaagcacgctggaaatgtgccggattatcaacgatgaagataaaaccgtaccgcttgccgttgagcgcgtactgccggatatcgccgcggcgatcgatgttatccacgcccaggtaagcggcggcgggcgtctgatttacctcggtgcgggaacatccggtcgtctggggattctggatgccagcgaatgtccgcccacctacggcgtgaaaccgggtctggtggttggtttgattgctggcggcgaatatgccattcagcacgcggtggaaggcgcggaagatagccgggaaggcggtgttaatgatctgaaaaatattaatttaacggcacaggatgtggtggttggcattgctgccagcggtcgcacgccgtatgtgattgccggactggaatacgcacgccagctcggctgccgcacagtgggaatttcctgtaatccggggagcgccgttagtaccaccgctgagtttgccattacaccgattgtaggtgccgaagttgttaccggttctagccggatgaaagcaggtacagcgcagaaactggtgctcaatatgctttccaccgggctgatgattaaatccggcaaagtgttcggcaacctgatggtcgatgtggtcgccaccaacgaaaaactgcatgtgcgacaggtcaatattgttaaaaacgccaccggatgtagcgcagagcaagcggaagcggcgttaattgcttgcgagcgcaactgtaaaacggccattgtgatggtgctgaaaaatctcgatgccgcagaagctaaaaaacgcctggatcaacacggcggctttattcgtcaggttttagacaaggaataacccatggccaaagagatcagcagtgaacttctgaacaccattcttacccgtgtcggcggaccgggaaatatcgccagttgtggtaactgtatgacgcgcctgcgtctgggtgtacatgacagtagtctggttgatcccaatatcaaaacgctggaaggcgtgaagggcgtcattttgaccagcgaccaggtgcaggtcgtttttgggcctggtaaagcgcatcgtgccgcaaaagcgatgagcgagctgctgggagaagcaccggtacaggatgccgcagaaatcgccgcccagaacaaacgtcagttaaaagccaaacaaacctccggcgtgcaacaatttctcgccaaattcgccaccatcttcacgccgctgatccccggttttattgccgccggtctgctgctggggatagcgacgttaattgccacggtgatgcacgttccggcagatgctcagggaacactacccgatgcgctgaattttatgaaggtgttcagcaaaggtttgttcactttcctggtgattctggtgggctataacgccgcccaggcatttggcggcacgggcgtaaatggcgcaattatcgccgcgctctttttgctcggttataaccccgcagcgaccaccggttactacgccggttttcacgatttctttggtctgcccatcgatccgcgcggcaatattatcggcgtgctgattgccgcgtgggcctgcgcccgcattgaaggcatggtgcgccgctttatgccggacgatctcgacatgctgctgaccagcttaatcaccctgctgatcaccgctacgcttgcgtacctgatcattatgccgctgggtggctggttattcgaaggtatgagttggctgtttatgcacctgaacagtaatccgttcggttgtgcggttttagccgggctgttcctgatcgccgtggtatttggcgtgcatcagggctttattcctgtttacctcgcgttaatggacagccagggattcaacagcttatttcccatccttagtatggcaggcgcgggccaggtgggcgcggcgctggcactctactggcgggcgcaaccgcacagtgcgctacgcagtcaggtacgcggggcgattattcccggcctgctgggcgttggtgaaccgctgatttacggtgtcaccctgccccgcatgaagccgtttgttaccgcctgtttaggcggcgcggcgggcggtttgtttatcggcctgatagcctggtggggtctgccgatgggcttaaacagcgcctttgggccgtctggtctggtagcgctgccgctgatgacttccgcacaaggcatccttccggccatggcggtttatgctggcgggattctggtggcatgggtttgcgggtttattttcaccacgctctttggctgccgtaacgtcaatctggactgatatcatgaaacggacaatgctctatctttctctgctggctgttagttgtagcgtcagcgccgcaaaataccctgttctgacagaaagcagcccagagaaagcagggtttaacgtcgaacggcttaaccagatggatcgctggattagccagcaagttgatgtcggttatcccagcgtaaacctgctgatcattaaagataatcagattgtgtatcgcaaagcctggggagcggcgaaaaagtacgatggcagcgtgttgatggaacagcctgtcaaagccaccaccgggacgctgtatgacctggccagtaacaccaaaatgtacgccacgaacttcgccctgcaaaagctgatgagcgaaggcaaactgcatcctgacgatcggattgcgaaatatattccggggtttgccgatagtccaaatgacaccattaaaggcaaaaacaccctgcggatttctgacctgctgcatcacagcggcggtttcccggcagatccgcaatacccgaataaagcggtcgcgggcgcgttatattcccaggataaaggccagacgctggagatgatcaagcgcacgccgctggaatatcagcccggcagcaaacatatctacagcgatgtcgattatatgctgcttggatttatcgtcgagagcgttaccggtcagccgcttgaccgctatgttgaagagagcatttatcgcccgctcggcctgacacatacggtatttaacccgctgctgaaaggctttaaaccgcaacaaattgccgccacggaattgaacggcaatacccgcgatggcgtgatccatttcccgaatatccgcacctccactctctggggtcaggtgcacgatgaaaaagccttttatagcatgggcggcgtttccgggcacgcaggtttgttttccaataccggcgatattgcggtgttaatgcaaacgatgctgaacggcgggggctatggtgatgtgcagctgttcaatgcggaaacggtgaagatgttcaccaccagctctaaggaagatgccacttttggcctcggctggcgcgtgaatggtaatgccaccatgacgccgacgtttggcacgctggcaagcccgcaaacctacggtcacactggctggaccggaacggtgaccgttatcgatccggtgaatcatatgacgattgtgatgttaagcaacaagccacatagcccggttgccgatccgcaaaagaatcccaatatgttcgaaagcggtcagttgccgattgcaacttatggttgggtagttgatcaggtgtatgcggcgttaaagcagaagtaataaaaaggccagtcagtaatgttactggctggtctgagagtgctgacaaacgcaaaactgcctgatgcgctacgcttatcaggcctacgtggagcccacaatatattgaattagcacgatttcgtaggccggataaggcgttcacgccgcatccggcgtgtacaacgcgcacttggtcaacaatctgaggccagtcagtaatgttactgcctggcctttaatcaatgaatcagaaacgcttacagcgccatcaacttgtccaggctcggtgcgaaataatagccgccggttaccggtttggtgaaacgcaacatcgcatcacgcttaccatcggtatcgccaaacatgctcagcagttgctgctcaatgttatgcagacgcgcgcagtaggcgcagaagtacagaccgtgagtgccactggcagtgccgtacggcaggctctggcgaacaatcttcagccctttgccatcttctttcagatcaacgcgggtgaggtgagaggtttccggacgttcgtcgccgtcgatctcttcgttggcctctttggtgcgcccgatcaccatctcctgatcgtgaacgctcatccggttgagctgcttcaggttgtgttcccaacgctggacaaacacatagctgccgcccgcatccacgccgtctttgataaccgccacttcgcgacgcgtctcttcacccgccgggttttccgtaccgtcaacaaagccgctcaggtcacgctcttcaacccaacggaagccgtggatctcttctttcacttcaatgcagtcaccaaaggcttccatcgccgcctgggcgacagagaagtttacgtcgtgacgcagagaaagaatgtggatcaacacatcgaactgggtcgtcggcgcaaggcctttaccgtagcccggaaaatctttcagctcttctgccccaacgccgccgctcagagcgcgccaggtgttgttaccaaaggcaaccaccgcaccaagatgcgcgtccgggaatttcgcttcaaaagttgccagtttgtcggcaaatgttttactggccgcacgcagggcgtcaacttcccctttcacgttggcttcgatccaaatcgccgcgcggcaatgttctggcaaaatgccactctgaacctgagacattgttcctcctgaaaataataatgccacgcaatccgtggcattgttgagcgctattttacgtgttttttcgcggcggcggtttgttcagacgcaaattaacgccgccagataattttactgactttccagtttttcagggtatcgtcgctaggcattaacccttcaggaccacgccattccccgctgaactggtagctaatatgttgactgccttcggctttacattcgacggcacgattatcatcaccatcagctttttggcaattgccaaatgctttgctgtaaaggtcgctaaacggtgtaccgattttaacaccggtgtcagcaggaatatcgctatccagcacgtcaatgcgactgatcgtgccttgatcgccgttaatcaccatcgccacgttgtcgcccttcatcacttcaaaaaagcgcaccacgttgccgttcgcggttttcattccgctgcgcaggcgataatcgccatcaagcgcatcggcaatggcttgttcttgcagtggtgtggacgccgttaattcacccacgccctgctcgctcactttggtggagctcccaaaccagttccacgggttagcggcagaccagttaacactgctcatcgtggaacagccggtcagcatcaatggcatagcgcataacattaaacgcaggcttttcatgtcacttcctttggttattcaataacgttgcttggagtgcaaattcaccaaaaagtgccgttattcttttacttcataaaaacaagcgcgtaaacgtcgattggtcagcagccagattaacgccacaatatccgccactaccagcgccagaccgataccgctaacggattcaccgttcagccacagccacggttgccagcaaagtaaaaccacctgcgccaacagcaacagaaaatagagtacacgccaggtgcgaggaaacgtagcccgccgaccgctcaacaaaaacgccagcaccgccggaatgccaggaatcagccccagccagaaattatcgtgatcgggataaaacagatttagcagcgcagtaccctgctcgcggctcgcaccggcaatgacaaacagcacccaggttcgcgcctgaagcaatagcacaagccagaagagcaagggtaaacgcaggcgaccgtgcgcatcataatggacaggatgaaactcagtactcttcatcttcaatcaaacgcttacccagactcagcacgtcggcgtgttcatatcccaggcgttcatacattccgagcaccatgtcgttatcttccggcacattgatctgaattttcgggcagccacgagcaatcagctttttctccagccgattaagcaacgcattggcaatcccacgcccacgaaactctggatgcacgccaagataataagcagacccgcgatgcccgtcataaccgcccatcaccgttccgaccacgtcaccgtttacctcagcgaccaaaaacaaactgacgtcatggttcatcttacgctcgatgtccatttccggatcgttccacggacgcagcaagtcgcaacgctcccaaagggtgatgacctcttcgaaatcttcctggcgaaatacgcgtatctccatggtattcgttacctttttgcgggttaaaaggctgattatggcgtgaacggtcgaattagccaatatctgacgaaaatcggttgaaaaagtggcataatggggagttgtcaactattgaaatgaaaagtaaaacaattctcaacagcaaaccgtcgtaacggattacgcgatacgatataacatctggaactttattattacaactcaggccgtatgagcacttttaaaccactaaaaacactcactagccgccgccaggtgctgaaagccggtttggctgccctgacgttgagtggaatgagccaagccatcgccaaagacgaacttttaaaaaccagcaacggacacagcaagccgaaagccaaaaaatctggcggcaaacgtgtcgttgttctcgatccaggtcacggcggaattgataccggagcgatcggacgcaacggtagcaaagaaaaacatgtggtgctggcgattgctaaaaacgtccgttccattttgcgtaatcatgggattgatgcgcgtttaacgcgttctggcgatacgtttatcccactttacgatcgcgttgaaatcgcccataaacatggcgcagatctgtttatgagtattcatgccgatggctttaccaacccgaaagctgccggtgctagcgtatttgccctctctaaccgtggggcaagtagcgcaatggcgaaatacctgtctgaacgcgaaaaccgcgccgatgaagttgccggtaaaaaggcgactgacaaggatcacctattgcaacaagtgctgtttgatctggtgcaaacagataccattaaaaatagtctgacgctcggcagccatattctgaagaagattaagccggtgcataaactgcacagccgcaacaccgaacaagcggcatttgtggtgttgaaaagtccgagcgttcctagcgtgctggtggaaaccagctttatcaccaacccggaagaagaacggctgttaggcacggcggcgtttcgtcagaaaatcgccacagcgattgctgaaggcgtgatcagttatttccactggttcgacaaccagaaagcacatagcaaaaagcgataagttatgaaacccgacgcacaccaggttaaacagtttctgctcaaccttcaggatacgatttgtcagcagctgaccgccgtcgatggcgcagaatttgtcgaagatagttggcagcgcgaagctggcggcggcgggcgtagtcgggtgttgcgtaatggtggtgttttcgaacaggcaggcgtcaactttagccatgtccacggtgaggcgatgcctgcttccgccaccgctcatcgcccggaacttgccgggcgcagtttcgaggcgatgggcgttagtctggtagtgcatccgcataacccgtatgttcccaccagccacgcgaatgtgcggttttttattgccgaaaaaccgggtgccgatcccgtctggtggtttggcggtggcttcgacttaaccccattctatggttttgaagaagatgctattcactggcatcgcaccgcccgtgacctgtgcctgccatttggcgaagacgtttatccccgttacaaaaagtggtgcgacgaatacttctacctcaaacatcgcaacgaacagcgcggtattggcgggctgttctttgatgacctgaacacgccagatttcgaccgctgttttgcctttatgcaggcggtaggcaaaggctacaccgacgcttatttaccaattgtcgagcgacggaaagcgatggcctacggcgagcgcgagcgcaatttccagttatatcgtcgcggtcgttatgtcgagttcaatctggtctgggatcgcggcacgctgtttggcctgcaaactggcgggcgcaccgagtctatcctgatgagtatgccgccactggtacgctgggaatatgattatcagccaaaagatggcagcccagaagcggcgttaagtgagtttattaaggtcagggattgggtgtaactccctcacccccactcccgcatccgctgatgcagcgtcagactcggcttctcggaaaacagctgctggtaatccgtggcaaattgccccagatgccagaatccccactgcatggcggcgtcttttaccgtcatactttggctccacggacttatcagttcgcggcgtacggcgttcaggcgaatgcgtttcagccacgcgttcgggccaatgcctaaaatagcgtgaaacgcgttttgtagcgtgcggcggctgacatgcagttgattacacaaatccagcaccgtcaccggttcggacatgttttccagcacatattcacgggcgcgggaaagcaatcgacggtaactctgatgactgatgctttccgccgtcaccattggttgcgcttcttccagcatggcccccatcgccattagcaaattatcccccagcacttttcgcactgcaggctgatggagattttccggattctcgcaaaacgtcgccagcgcctgttggacaaagccccacagcgcggctttatgctgctctttcacttccagcgcgctctggttacgcaacatatgtaatacccgatccgggttatgcaaaaagttagcctgccgggtgatgacatcttcagaaagcaccacgcccaggatcgtgtaatcatccggcgtgctcagttcaaattcagtgccaccagggcgggtggcgatttccgcgcttcccagacattggctaccgataaatccctgctcaccgcgcgtcgccggaatgccaaaccagaagctgttcggccagaccaggcagctctgacgcagcgccagaccggtgtattcacgaaaaacctgaatatcatcgagtagaatttccgtaaattcaccatgaaacttgcccggatgcagctgatcgtaaatctgctgccaggcggtaatcgttaaagcatgttcatagacatccgttgtctgtcgttgatgaacattatccacttcgaccttcggcgtgagcttcaggttttcgggtaagggttcatgataaagatggtgcaaattggctgtacgggtctttttcatgatgttaatgccgggtgttgtaggacacccggcacctccgacaggttaatggggcttgagacgataacgactactgcgtttacgtaacgtcccggcagaaaagagctgttcgagcgcatttctggctttttccagcggccagccaaagtgggcagccacttctcctgccgtcattccctgacgtacacttgttaacagcgccaacaactcgtcagcagattccgcgacgataactggcgcgtcgggttcccttacgggttgcttcggctggcggttaaagccagtaaccagccactgggtgtcatcgtctggccgaccgatctccttgcggctgatgacacgcccggtacgcatcgcggcagcacaacctgcgtccagcgccgcacgacacgccgccagatcgccttccaccaccagcgttaagcgaccagggtcaagcacttcgtgactgagcagacgaacgttagctgctttgagcatggcatccgctgcatctatcgcggcgaccatgccgtccacttccagcaatcccagtgcattgatcatcggcaacctccgttacgcacgctggattggattacgcgcgatttccagcactgcatcggtaaaggcgttacaggctgctttacacgctgcctggctaccggttaaaaatgctgcgctgtagttggtttcagacggtggcgggacataggtcgccagctgtacgtcggcagacttcagggctgcatcaatgccataggtcgcttccagcggcggtgccaccagatacgccatcggatcgccaagcgtgatcccggcggtactactgagataagaaccggtacggctaactacatgtgccaggaatgccgtatcttgcgcgtcattagcccactggaaagctgcgccattttcaatatgcgcaatcatcgcatccagacctgcacgcacttccgccgggtttggcccaccaagcataatcagcacttcaccggcagtcggactcgggccgtgtgcagcgcccgcatataggctgcggccatacaccacttccaccatcgcctgcttggtcgcttcatcagcggcaatgtaggtgacgtcatcggagtcggcagaaatcagaccgaggctacgaatatgcggcggcaatttcagttcacgcgcaaaatcggcgttaacggaggcaatcacccgcatagcggtgacagacggtcgaatcaaatctaaagctggcatgatgcctccttatcgggtcatgttgatgccggatgctttctgctccagcatacgtttcgccaaatccacaatgacggctgcggcttcaaccggcggcgtgccgccctggtgaatgttagagatacaggtgcgatcggcctcaacggtggtcgccatacgcgggctgtaaacggcgtagcaggagaggctttcactctgacccaaccccggacgttcgcccaccagcaggatcactactttcgcgccgaggatctcaccgatctgatcttcaatcttcacgcgaccataacgaacaaagaatggtgtaccgactttcagcccggcctgtttcaggcccgccatcagcggtggcaggatctcttcgtagttcacggtgatcgcatcagtactcaggccatcagaaataacgacctgtacgtccggattggcaacacactgcgctttcagcgcttcaacagcttctgcacacaggcggcggcccatatccgggcgagtcaggtagagatttttgtcgctaatttcagagcgtacttccagcaagccctgcgctttcacccactcttccggcacttctttcagtacggtatctttgctacgagagtgatcggccaggaaacgcagcagcgcctgcgtacgtggacgcggaccggcacgaccggtacaaacgcgggccacggtgctgcggcgcagttctgttaatacgtctgcgcgatgcggattttcaacaccaatccacgcttttgcttcagcggaacctaaatccagcgcacagctttcgctggtcaccggtgccgcacagttggtggtggcgcactttgcttcactcggcgcgggggccgcttgtcccatactcgccatcacgctgcgtacaatttcttcaatctgtttttgatccatgatatgttatctccgcgtcatcagaagaacagactcggatcgcccgcccgtttggtcaggcgaccgtttgccataatgcccatgctttccagccagcgttcaaactccggactcgggcgcaggttgagtaactgacgcacagtggcggtatcgtggaatgcggtggtctggtagttgagcatgatgtcatcacccagcggcatccccatgatgtagttgcagcctgcggtggcgagcaggatcatcaggttttcgttgaggttctggtcagcgtcagcgtggttggtataacagcagtcacagcccatagagatgccgctcagcttgcccataaagtgatcttctaagccagcacggataatctggcggtcgttgtagagatactccggcccaataaagccgaccacggtgttgacgataaacggatcgtaatgacgcgccagcccgtagttacgtgcttccatcgttacctggtctgcgccgaagttagcgccagcggatagcgcagagccttgtccggtttcgaagtagaggcagttttccccggcgatacggttgaactccgcgcccactgcgcgcgcttcgtcgagcatcgccagctccacgccaaactctttcagccctttttcgctgccacagatactctggaaaatcagcccgcccggtgcgccacgacggatcgcttcgatctgggtggtgacgtgcgccagtacacagccctgagttgggatgttgaatttgtcgatcacgccatagatggtatccaacacgcggcttaagttttccacgtcgtcagtcaccgggttaacgccgatcaccgcatcgcccaccccgaaggaaagcccttcgtagatttgcgcggcgatactttgcacgtcgtcacgggtgtcatttggctgcaaacgggcgctaaaggtgcccggaataccgatggtggtattggcctttttgattaccggcattttcttcgcgccgtagatcaggtccgcgttggagcaaatcttcgctaccgccgcgaccacttcgctggtcagccctttgcgggtaaaggcaatgtcgtccacgctggtttcatcgctcagcacatactcacgcagttcgctgatgctccagtttttaatctggttgtaggccgtttcgttaacatcgtcctgaatcagccgcgtcacgcagtcatcttcataggcaatcaccggattattgcggatgtccgctacggtcatttcgctcaacacctgctttgccgccacgcgctcctgactgcttgccgctgcgacgcccgccagcacatccccgctacgcagttcgttggctttagccagcacctcttttacatccttaaactgatatacattgccgaacaatgtggtctttagtttcataagtcgttccctcaggaaggaaatgcgagacttttcaccgtcaccggcacaacgcttccgccaaaaagaggcgtaccaatgtcgatatagtcccccgcgcggacaatcacttcgtcaatgactgccaacgggagttgttgtagctgtgggcgcaacaacatgcccagagctttaccaaagtcctgcccggccaccaccagcaggggatgcggattcggaaaacgcgcgacgaaatcgaccaacgcgttgatgaccgtcagtaccgcggcgtaacgcacaggcaggctggcgggaagcgccagcacgtacgcgtcagttttgggatcaagatccagctgaatcagcgcctgttgccaggcccccaccagatccgtttcatcaatcgggatcgccaccggcaaattgcgcagcggcagttgtacgccctcaagccagattgtgctgccagagaggctaagggtatgcgcgcccgcgccaatcaccgtggcgcgcacggtttgcgccggaaactgtacgttcatctcacgcaggcgcggatggtcatgcagcgcagttgccagcagcgggccaatatcggcaaaacagaacgggtcggcgggctggtggcgataacattcgcccacgccgccagaaagcgtaatgatttcgggcgtaacacctgcgggcagcaaaccggtttgcatcaatgcctgcgcgagcggactgagcgttccgtcaatcacttcgacaatcagttctgccatccgccgggtcacctgcaccagctgcgcgccggtcaggctacgggcgtcggtgcctgcaccgaagcactcatccacaatcatctgccccggtttatgagcgtaaaccacgcgcccgtggctgtcggtttccagcaggcgaccaccgacgttgaggcaggcagtgccgctgatttttccggcatcgaacagggcgtagttcgcggtgccaccgccgatgtcgatattcagtacccgacacagccgttgttcagaaagggtttgtgccccggctccgtgaccggcgatcacggattcgaggtgcggcccggcgctggcaacgacaaaatcgcccaggctctgagagagcgccatcaccgccgggcgagcattgcgggttttcgcgctttcaccggtgatgatgatggcaccagaatcaacgctttccggctcaatacccgcagcatgatattgctcgagtattaaggttttcagttccgcttcttttaaaccgccctgtttatcgacaggggtaaagaacaccggactttgccagctaatttcgcgtttaatgaattcgtagcgcggcacctggctcaccgccgcacggttaaccagctccagccgggagaaaatcacctgggtggtggtggtgccgatatcgataccgacgctcaatagctggcgagtgttcacgattgtgcctccgcttcggtttaagtcagctttgtgcctccgcttcggttttagtcgcggtcgcgtcttcttttggcaccagcatcatcgccacgccaatcgccgttacgccgccgatcaacttgccgacaatcatcgggaagatcatggcgttcatgttggcagcggcgaagcctaagtggtcgcccagggcgaaagcagcggaaacggcgaaggcgcagttgatgactttgccgcgggtatccatctgcttcatcatgccgaacatcgggatgttgttggcaagcgttgccaccatgccggctgccgcgatgttgttcatattcagtactttaccgacgctcatcagcggtttttcaaaccagcgagtcagcagcagcaccatcggatacgcccctaacagaacgcaggagatagaaccgataacttcaatggcgcgcatcacctcaccgggtttatcgccaggggccataaagataggatccagaccggggatcagttcccagccaagcaggaatttcactaccgcagcggcaagaccgagggtgatcaatgcaacgaggaatttggcgaagatctggaagccgttgatcattttttccgggatgaatttcagccccagcgccaccagaatcgcaacaatgatcaccgggatcatgttcatcaggatcagggcgaaagtgaattccaccggctggccgttgatctgcacaccggagtacatagcaaccagaccaccagcgatacaaccaatcggaatggtcacaatgcccgccagcacgccgagcgccagataacgacggtcagaaggttcgataatgccgagcgccaccggaatggaaaacacaatcgttggccccatcatgctcccgagaattaacccagagtatagccacgcggctacgtcgccgcccgccagctctttggcgaggaagaagccgcccatatcgcacgccagcagtgttccggcgaacatgcttgggttagcgccgagcatttcgtaaaccggaataattaccggcccgagaacgtgagccagtaccggtgccagcgcggtcataccgaccatcgccaggcccagtgcgcccattgccataaagccttcttcgaactgaccgccacttccttcgatacttttaccgaacttaccgaggaaacgagcagaaccgccgaactggctcaggatcctgtctacggcagctatcagcataaagaacatcatgatgtacatgatgatttcgttaattcccatcgcctttactccctgttagttgttatttattggcggatgcggcgtaaacgccttatccgccctacatgtgcaatcccgtaggctggataagacgcggcaagcgtcgcatccggcaattgcaccgcgccactggcggatgcggcgtgaacgccttatccgccctacatgtgcaatcccgtaggctggataagatgcggcaagcgtcgcatccggcatttattgcgccgctgcgtacaggccgacaatctgctccaggctggcggtacgcgggttactgcgcagacaaatatcttccagcgcggcctgcgcccatgcgccgtaatgcgcagatgtcgcaccaacatcgcccagtcgtttaccaatcccaacttccgcaatcagctcacttaccgcgttaatagcgtcacgatcgtcggattttttagttcgcagtgcccgaccaatctgactaaagcgttcacgacaaaccatccggttaaattccatcaccgttggcagcaacatggcgttcgcgagaccgtgcggaatatgcagcgccgcgcccggctgatgcgccatcgcgtggcacaacccaagacccgcactggaaaacgccattcccgccatacaactagccagcaacatgctctcgcgcgcggcaaggtcgtgaccgtagcccaccgctttcggcaggcttttgccaatcatcgcaatggcaccaatcgccagactgtcggtaaacggtgtagcgttcagggcgctgtatgcttcaatggcatgggttaacgcatcaatgccggtcatcgccgtgacatggctcggcacaccttcggtcaatgcggcgtcgaggatcgccacatccggcatcaggctggcatgggctaacacctgcttgcgcccgctcaccgcgtcgataatcaccgttacattggtggtttcagagccggttccggcggtagttggaatggcaatcagcggcaagcgcggttgcagaacgctggtttcactcatctctgccagcgtgctatccgggttcgtcaccagcaacgtcacggctttcgccgcatccagcacgctgccgccgccaaacgcgatcaccccatcacagccactctcacgcaactgcgccacggctgcacacacgtcggtaatgcacggttcgcccaccggacatggccagagcgtcatggcgatacctttaacggtcaggctacgcgtcagcccggcggtcatccctgcctgatgcaaaaagctgtctgccatcacgaacagatgtttcagcccacgcgtttgcgcttgctgtccgcaactgctcacgctgcccggaccgcaaagcgtcaccggtggaacgctaaatgtttttacccgttgcagattcagggtatcgaacgcctgaaagagcgcggtctgcaattcattttgcatatagcccctccgctttctctcgcccactactggcgatcgccagcggggtcataaacaaactgtgctgcggtaaatgcacctgtaacgccgggaattgtttgcgaaacagttccgccacgcccggttgcatacaagagccgcccgccagccataaatcagtaatgccctgcccttcaatatgccgggcgacaatgtccgccattttttcgtacaccggtttcaccgcaggccaaatctcttcaccgtgaccgcgcttgtactgctccgcctcttccaggctaatacggcgatttccggcgagagtcagagagatgtgatgtccgccggtggcttcatccgcgctgtacgtcaccttgccctttttcacgatggcaatgccggtagtgccgccgccgatatccactacaccggcgttgtccagttgcagcagatccgcaactgcggttggctcatccagcacatggctcacttccagtccggcagattccagcacgttgatggaaatacgcgggtccgtacctggaggaaaactagtcgccgcatggctaaaacgacgaccgaattgctgctcgagcgtgtcgagatggcgacgaacaatggtgacagcgccgaagaaatcccagacgatgccgtcgcgaaccacatcggcccagtcgaggcataccgccactggctgaccgtcgcggtcgacaaccatgctcaccacatcgcaggtgcccagatccacccccagccacagcggagattccgtcgcggcgggcgtctggttacacagcgttgccgccgtttgcagacgtggggtgagccattgttcgtcgtgcgccatctgttactccttaaacaatgcgaaacgcatcgactaatacacagcgacgcagacggacaaacgtacgcgcgctggttaccccttcaccggttggcgtggtgatggtcatggtggtccagccttccccgcccagccccagcccggcaatgcacggtccgttcttaacgaaaatgctggtatcaatagcattcgccatctggttcatgttttcgatgttgcggctgtgcattgccgccgtgtggtggcaaccgccttccagtttcaccgctagcgcaatggcatccgccacgttggcgacgcgcacgacgggcaacaccggcatcatcagttcagtcacggcaaacggatgttctgcggtggtttccacaaacagcaggcgcgtttcttgcggaactttaaggccgattgccgccgcgattttgcctgcgtcgcgaccaacccagtcacggctgacggtgccttttccgcgctcgtcgatatttttcagcaacaccggttgcagctgctgcgcctgttctgcggtcagtttcaccgcgtgctggccttccatcagacgcatcagttcatcggctacgctatcaacaacaatcagtaccttttcgtcggcacaaatgatgttgttatcgaaagaagcgcctttgacgatggactgagcggcacgggcgaggtcggcggtttcatccaccactaccggcgggttgccagcgcctgcggcaatcagacgtttattggtgtgtttacgcgccgcttctactaccgcttcgccgccggttaccaccagcaggccgatacccggaaacttgaacaagcgttgcgcggtttcgatatccggatttgccacagtaaccagtaagttttccggcccacctgcggcaacaatcgcctggttgagcagcgtaatcgcccgctgggagacttttttcgccgccggatgcggggcaaaaatgacgctgttgcccgcggcaatcaggctgatggcgttgttaattacggttgccgccgggttagtggaaggcgtcacgctagccaccacgccccagggtgcgttttcaattagggtcaggccgttgtcgccagtcagcacttgcggagagaggcactcaacgcctggtgtgccgcgcgcctgagcgacgttttttgcaaatttatcttcaacgcgccccatgccggtttcactgacggcaagttccgctaaatctctggcgtgtttttcgcctgcttcacgaatggcagcaatggctaactggcgcattgccacgctttttaacccttgctgggcgactttggctgccgcaacggcgtcatccagggacgcgaaaacgcccatctcatgaacggcggcggacggcgtgtcactgctttgcattttcagcagtaccgctttcaccacctgttcaatatcctgttgattcatgatgttctgccttatttgtggaaaattacctgaccgccagacaccacctcatcgacaatgccaatcacgcacagatcgaccggactcgtttcgcttttatgcgcctggcgggcggaactgccactcaccagtaacacccactccccggttcccgcgccaatattgtcgatggcgacggcgcattgcccgtcaggattaccttgtggatcaatcatttccaccatcagcaatttgtcatgcgccagtccgtgatggcgtacggtacaaacaatttgtccagtgacgactgccagtttcatacccgcctccgtggcgtatttcaggtaaaagctccccctaccctccgcagaaggtaaaatgaaaaaggagagagcgtgacgcccgaatcgacgtcacacagggtgattacaggttgctgctatcgcctttcaggccgatcgggaagacttcttccaggtcgccgtgcggacgcgggataacgtgtacagataccagctcgccgatacgctgtgccgctgcggcacctgcatcggtcgcggctttacaggctgcaacatcaccacgaaccatggcagtacacaggccgccgccaatctgcttaacaccaaccagcttgacgcgcgcagctttcaccatcgcgtcagaagcctcaatcagtgcaaccaggccccgggtttcgatcattcctaatgcttccattgtgctttcctctttatcagggtccagaacgggaccgttcattcaaccagtgtttgtaaactgctttcgcggttcacttctgtctgacgcggcacagctgccaccagcgccagctcgataatttcctgcacgctacaaccacgagagagatcgtgcatcggcgcggcaagtccttgtatcagtggcccgacggcacgatatccgccgagtcgttgtgcgattttgtaaccaatatttccggcttccaggctcggaaaaaccatcacattggccttgccctgtagcgggctggcaggcgctttttgcgccgccacttccggcacgaaggcggcgtcaaactgtaactcgccatccaccaccagctttggtgcgcgctcacggacgatttctgtcgcctgctggacgttagcaacacaggggtgacgggcgctaccattgctggaaaagctcagcatcgccacgcgcggctcttctccggtgatggcgcgccaggtttcggcactggcaagcgcgatatccgccagctgcgccgccgtcggctgtggcaccacgctgcaatcggcaaagcccaacgccgggccgctgtactgtggcaacatcaggaaaatggaagagagcgttttacagcctggctgcaagccgataatgcgtaatccggcacgcagcacatttgccgtggaagagaggttgcccgcgatacagacatccgctttaccggcgctgaccattgctgcggcgaacatcagagggtcggtaagtttttccagcgcatccggcggcgttttttcgcccgcgcgggccagccagcgatgagcaaattcttcccgcattgcgaggttgccatgcggatcaatcacctgtagcccgtccatcgccacgccgtgactgagcgcaaactgacgaagttcaaacggattggcgaccagaatgggcgttgccagaccttgttgatgtaaatattgcgcggctttcagcacacgttggtctaacgcatccggaaaaaccactctggcgggcgctcgcaacgccagttcacgacaacgttcaataatcattgcgtttcccccagtcgttgttggatctgcttcaccgttagcggctgcttcgttacgctcaggatcatcatcacgtagaccgtgctgctaaggcggttcagcgcctgcaaaatgtccgggcgtaatacttcaaagctgcgggtgataaagacctgcgccgctacggtttcggtttcccgcactttggtgcgtagcagattgagcaacgcagcatcgcgcccgtggctggcttccggcaccagatgatcgtggtcgagatagcgcagcggctgatgagaaagccgatgcagatcttcgtcagaaagcccgacaatcgcctggcagcccagcggttcccccagcgcatcggcgcgcataatgttgccaagacggctacggatatccgccagccacggctgccacggttccgccagttcaatttgcagccacactgccagcgcaatggtgctgtcgagaaccgcgcgaaaacccagacgcggatcgcttttggcgaccattttttccgcgctcaggtgagtcagcgtatccggcttttttgccaccggctggcgacacagttcgcagcacgcctgcggatgttcatcgctactggtcagcccatgaacgggctgcggctgctgctgttcatcgtcaacaaacaggcggccctgctcgtcaataaacttgatgcgcagatggcggctttccagcaactcccgggcagagggcgtcaggcgactgtccgcagggagatggatctctgcgccttcgctgagcgtatggttcgctcttagccatgcttcggtgatgaaatctttcatagggattgccagttagccggccaggcgacatacaggaatttcacgctggatgtcgtaccaaattcgatgctggagcctttcgggataaacatcacgtcgcctgctttggcgatcatggtttggccttcgtggcgaacatgcagctccccttccagcaccatgtcgatttcgtcgtagttcagggtccacgggaagaatgcgttctcccactgcataaaaccggcggccatgctgctgccgtcgtctccggtcacaagatcagtcaagcccacgcaatgcggctctgcgccgtcgaaacgaccaaacttgacgctactgccatcaatcactttgatgccgcctttgccggtcacgcttttgaagctcggctgcattgcgccctgctccaggctctgtttttccttcatcactttttccatcagctgtgcgaccaggctttcggtaaactggccttccggcagctgggcaatgatggtttcgcggatgcgctggctttcggttttgtcggctggcacgctggcgggcacggacgccgttaccgggatgctttcatcacattcggtgatggtaaaacccagtagatccgccacttcacgggcttccggggtaataatgctggcgcgcagaaccacggacattgcctgttcgccgcgcgcgtgtgcttcacgaatatcattcgctgtgatgagttttttcacctgcttcctcctgtttggtgagagatgccagataatccaccagttgctgcacgctttgcgggtcgtggctgtttagctcgaacatcggctcttcgaaacccgtctcaagcaataactttcgcgttgcggcgacgtcagcatctggcatgtccgttttactgatgacggcgatttgccgtttgctgacgccaatatccagcaacccggcaggcaaccgactttccgggtcatttgcgccatggacatagatcagcatgtctacatcctgtagcgtggtaattaaggcgtgataccagcggggatggttaaaatattcacccggcgtatcaatatcgcccttatcattaaattccacggcctgtgtttttctggcgagggtataattcccctgcaacgcattaaataacgttgtttttcctgccccgacgctacccacaaacgcaattcgtttcatgaatgcctcgtattaacttttggtcatttcacaaagcgtataatttaataagcgacctaaaccgctgacggtttgacttaacgcttcttctactgcgcccacgctgccataaatcaccaatgcaccgctgaatcggtcgagaaaaccgatatgcacatcagcggctttcagcgctaaatcaccggcgatcatcgccgtttcgccgggagttagcgtcataatgccaattgcgcccgcatccggaacgccgattttcttcgccagttcctcaccgggatgcgcgatgagatgcgccagtgtgacctgtttgccgggcacaaattcctgaatgatgcgttctttatccatgagtcgccgcctgtgaaaaactttcgtgtatcgtgacaatttttcgtcagagtaaataacaaaattcggcaagcgcgtttaaaaggtgaggtagatcactaagaatggagagatattcgctgtggtgcataaactttcatatgcaacgcatgaatataaataaaataatatcgagatattatatagactgcttttttttattattcgcaaactcagtaataagctttactaatatattgcagctaaactgcttaccctgaatattcagggtaagcgtgagagttaaaaaaaattacagcggttgggtttgcgcttctaccacggccagcgccaccatgttgacgatacgacgcacgcttgcgatcggcgttaacacgtgaaccggtttcgccacacccatcagcaccgggccgacagtcacaccttcgctgctggaaacacgcagtaagttgtaactaatgcgggcagcttccatgttcggcatcaccagaatattggcggaacctttcaaagagctgtccggcatacggtcgttgcgaatcgcttccaccagcgctgcatcgccgtgcatttcaccatcaatcatcagttctggtgcacgttccctgaccagttccagcgcctgacgcattttgctgctgctcgggcagtcagaagaaccaaagttggagtggctcaacaaagcaacgcgcggctcaataccaaaacgacggacagtttctgccgccatcaaggtgatctccgccagctcttctgcatccggttcatcattaacatatgtatcggcaataaaggtgttaccactcggcagcagcagcgcgttcatggcacctgcggtgtgaacgccatcgcgataaccaaagacatttttcaccacgctaaaatgttcatgataatcacccaccgtaccgcaaatcattgcatcggcttccccacgctgaaccatgatcgcgccgatcactgtcgggttactgatcagcgcccgctgcgcctgttcctgagtgacgccgcgacgcttcatgatctggaagtattcggtccagtactctttaaagcgcggatcggattcgttattgacgatctcaaaatcaacgcccgctttgatctgcaagcccagtttctgaatgcgcatttcgatcacgttcggacgaccgataaggatcggtttcgccagtcccagcgttaccagttcctgagtggcatgcagaacgcgcgcctcttccccttccggcagaacaacgcgcttcggcgctttgcgagcctgggagaaaatcggcttcataaacaggttggttttgtaaacgaactcagtcagcttgtcgatgtagacgtcgaaatcagcaatcggacgagtcgccacgccgctctccatcgcggctttagcgaccgcaggagcgatcttaacgatcaagcgcggatcaaacggctttggaatgatgtattccggaccaaagctcagatcctgatcgccatacgcactagccaccacttcgctctgttccgcatgggcgagttctgcaatcgcacgtaccgccgccagtttcatctcttcgttgatggcggttgcgccaacgtccagcgcgccacggaagatgaacgggaagcacaggacgttgttcacctggttcggatagtcagaacgaccggtgcaaatgatggcatccggacgcacttctttcgccagcggcggcagaatttccggttccgggttcgccagcgccaggatcattggcgcacgagccattttcttcaccatttcctgggtcagcactttcgggccggaacagcccaggaaaatatccgcgccttcaatcacatcatcgagggtacgtttgccgtcatccaccaccgcatatgcggctttggtttccgccatgtttggctcacggccctgatagataacgcctttactatcgcaaaccacgatgttatgtttttgcagacccagcgctaccagcaggttcatacaggcgattgctgcggcacccgcgccggaaaccaccatccgcacgtcggagatgtttttctccaccacgcgcaagccgttgaggatggcggcagtgctgataattgccgtgccgtgctgatcgtcgtggaataccggaatattcatccgctcgcgcagtttctgttcaatatagaaacattctggcgctttaatgtcttcgaggttgatgccgccgaaggttggttcgagcgcggcgacaacttcaataaatttgtccgggtcgagttcgtcaacttcaatgtcaaatacatcaatcccggcgaatttcttaaacagaacgcccttgccttccatcaccggtttgcctgccagcgcgccaatgttgcctaaccccagcaccgccgtaccgttagagatcaccgccaccaggttacctcgggcggtatatttgtaggcttttaacgggtctttttcgatttcaagacaaggtgcggcaacgcctggactgtaggccagcgccagatcgcgctgtgttgccagaggcttggttggagaaacctggattttccctggaactggaaattcatggaaatcaagtgcactttgttttaactggtcatccatttggttgttcctttcacgtaacgttcacaaataaagtgtgtgggcaacagcccctgcccacaacgtggcgcacattattaccctgccggagtctacagactttgagcaagtccaaactctcaccattaatataatgttttggtaataatcctataacactgatgttacctgcttaatccagcaataccatgcctgtctgctatgcttttttgatgcgtttagcgaaatttctcagaagtgtgaattaacgcactcatctaacactttacttttcaaggagtatttcctatgaacgagttagacggcatcaaacagttcaccactgtcgtggcagacagcggcgatattgagtccattcgccattatcatccccaggatgccaccaccaatcctagcctgttactcaaagctgccggattaagtcaatatgagcatttaatagacgatgctatcgcctggggtaaaaaaaatggcaagacccaggaacaacaggtggtcgcagcgtgtgacaaactggcggtcaatttcggtgctgaaatcctcaaaatcgtacccggtcgcgtgagtacagaagttgatgcacgcctctcttttgataaagaaaagagtattgagaaggcgcgccatctggtggacttgtatcagcaacaaggcgttgagaaaagtcgcattctgatcaagctggctagcacctgggaaggaattcgcgcggcagaagagctggaaaaagaaggtattaactgcaacctgacgctgctgttttcttttgcacaggcacgggcctgtgcggaagcaggcgtttttctgattagcccgtttgtcgggcgtatttatgactggtatcaggcacgcaagccgatggacccgtatgtggtggaagaagatccgggcgttaaaagcgtgcgcaatatctacgactactataagcaacaccactatgaaaccattgtgatgggcgcgagcttccgtcgcaccgaacaaatcctcgccttaaccggctgcgatcgactgactatcgcaccgaatttactgaaggagctgcaggaaaaagttagcccagtggtacgtaaattaatcccaccttctcagacgttcccacgcccagctcccatgagcgaagcggagttccgttgggagcacaatcaggatgcgatggcggtagaaaaactgtctgaaggcattcgtctgttcgccgttgatcaacgcaaactggaagatcttcttgccgccaaactataaaccagccacggagtgttatatgtcccgaaaagaccttgccaatgcgattcgcgcactcagtatggatgcggtacaaaaagccaactctggtcatcccggcgcgccgatgggcatggctgatattgccgaagtgctgtggaacgattttcttaaacataaccctaccgacccaacctggtatgatcgcgaccgctttattctttccaacggtcacgcgagcatgctgctctacagtttgctacatctgaccggttacgacctgccgctggaagaactgaagaacttccgtcagttgcatagcaaaaccccaggccacccggagattggctatacgccaggcgttgaaaccaccaccggcccgcttggacaaggtttggcgaacgccgtcgggctggcgatagcagagcgtacactggcggcgcagtttaaccagccagaccatgagatcgtcgatcacttcacctatgtgtttatgggcgacggctgcctgatggaaggtatttcccacgaagtctgtagcctggcaggcacgctgggactgggcaagctgattggtttttacgatcacaacggtatttccatcgacggtgaaacagaaggctggtttaccgacgatacggcaaaacgttttgaagcctatcactggcatgtgatccatgaaatcgacggtcacgatccgcaggcggtgaaggaagcgatccttgaagcgcaaagcgtgaaagataagccgagcctgattatctgccgtacggtgattggctttggtagcccgaataaagcaggtaaggaagaggcgcacggcgcaccactgggggaagaagaagtggcgctggcacggcaaaaactgggctggcaccatccgccatttgagatccctaaagagatttatcacgcctgggatgcccgtgaaaaaggcgaaaaagcgcagcagagctggaatgagaagtttgccgcctataaaaaggctcatccgcaactggcagaagagtttacccgacggatgagcggtggtttaccgaaggactgggagaaaacgactcagaaatatatcaatgagttacaggcaaatccggcgaaaatcgctacccgtaaggctagccaaaatacgcttaacgcttacgggccgatgctgcctgagttgctcggcggtagcgcggatctggctcccagcaacctgaccatctggaaaggttctgttagcctgaaggaagatccagcgggcaactacattcactacggggtgcgtgaatttggcatgaccgctatcgccaacggcatcgcgcaccacggcggctttgtgccgtataccgcgacgttcctgatgtttgttgaatacgcccgtaacgccgcgcggatggcggcactgatgaaagcgcggcagattatggtttatacccacgacagtattggcctgggcgaagatggtccgacgcaccaggctgttgagcaactggccagcctgcgcttaacgccaaatttcagcacctggcgaccgtgcgatcaggtggaagcggcggtgggctggaagctggcggttgagcgccacaacggaccgacggcactgatcctcagtaggcagaatctggcccaggtggaacgtacgccggatcaggttaaagagattgctcgtggcggttatgtgctgaaagacagcggcggtaagccagatattattctgattgccaccggtagtgagatggaaattaccctgcaagcggcagagaaattagcaggagaaggtcgcaatgtacgcgtagtttccctgcccagcaccgatattttcgacgcccaggatgaggaatatcgggagagcgtgttgccttctaacgttgcggctcgcgtggcggtggaagcaggtattgccgattactggtacaagtatgttggtctgaaaggggcaattgtcgggatgacgggttacggggaatctgctccggcggataagctgttcccgttctttggctttaccgccgagaatattgtggcaaaagcgcataaggtgctgggagtgaaaggtgcctgatggtgattgccggatgctgattgccggatgcgacgctgacgcgtcttatccggcctacagcgtcttatccggcctacatgtcccgccattttgtttaacgggtgatccacaacgtgggccaggcgtctggcccatgccagttatcgcaggtgggttctgcggcgtaacgcaccaggcgaaaacgctgaccgtcaaagcgccagcgcgcctgaatgccacaatcgcttaatccgcgccctttcgctaaggtcaccagttcacggcttttctcatcaaatgttgcgttcatcagttccagttcattcgtctcctgaccgttgttgaacggcaaacgcaaccgaaccgggcggctagctagtggctttttacggctcacaatccatgccaaatcaatggtgttataggcccctgcctcacagctaatcatcatcagcgctttatcatcagtcagcgcagtgacattcacctcacgacgcaatggatcaaggctgcagcgcagaccattcatccgccagtttccataatccagcaaatcgttgcgttcttcgagactgagtggcgtcggcgttgggttaaccaccgcgacctctttcagcgcaggcgcgggcggtacgctgagcggcggttcgtcccctttcttgatccacgcggtttcactgccaacgcgcttttgctgagcatcaataaacaacaacgctgcttttaagccactcagagaaatggtctgatcgccatcgcgtaaggtgattgccttcccttcctgaatcatctgcaaaaacgcggtgatggttgccgtatcatcggttactaataaccatggactaatccgccacttgtcaccacttaacgccaacggctcgccatctaacagcagccgtggcgctatctccccttcactcgcctccgggctcttcaatccgccgcgctcaatacgtaaaacggcatcggtatgcgccccggcgctgcggctcagggtcatcaccagtccattatgatcgcccgtattacgcgccacgcagaaattttggttattacaggtgacctgccagtcggaaaacgcccgttgcgctggtgccgcccacaccaaagacgtcggcaacaaagcgaaaaaaaagagaaggaaaatgcgatagcgcatggacggtacgaccccagaagttcaaacaaacagcacaagtcgtatcttcgttgcgcaggtagcgcggctcaatcggatttgtcggattgagccaataataaacaacgaaatattattgttatttttcagtccattaaatgactcgtttgcaaatagttaagcaataacaccgtcttaccgtcacgtatctcgccggttttgatcatctccagcgcctggctgaacggcagctcgagcacttcaatatcttcatcttcgacaccgccaccggcgttagcgcgctgattgtcactgtattcggcgataaaaaagtggattagctcagtcacaccgcctgggctcatatacagttcaaataatttgcgcacttcacccacttcatagcccgtctcttcaatcgcttctttgcgaatacacacttccggttcgtcgttatccagcagcccggcgcagctttcaatcagctgcccgctttcattgccattaacccaggtagcgacacggaactgacgaatcagaaccacggtctttttcttcgtgttgtacaggaggatcgtcgcaccattgccgcgatcgtacacttcacgtttatggcggataacttcgccgtctttgcgcgtgagatcgtaagtaatgttgtgcagggtgaaatagttatcggagagaattttgtctttaatgagggtgatttgttgcgtcataccgactccacagcgcgaaatgaacaattatcttacgctgtgaagtcgggtttgtctgcgcaggctatcagtgagatttgacactttttacccccagccagtcaataatcccctgtgccgcatgacgtccttctgccattgcggtaaccaccagatccgcaccacgcacggcgtcaccaccagcgaagattttcggattggtggtctggtaacggtactggctttccacatccgcgatgatgcggccccatttgtctaccgttacaccgtggctctccagccacggcatcccgtgcggattgaagccaaacgccataatcaccgcgtcggctggcatgacaaattcactgccttccaccggcactggacgccgacgcccctgggcatccggctctccaagacgcgtgcgcaggaaacgaatcccgcagacgtgaccttgttcattcagctcaagcgccaccggctggacgttaaattcgaagttggccccctcttcgcgggcgttcttcacttctttcttgctgcctggcatgttagcttcatcacgacgataagcgcaggtgacgttactcgcgccgtggcgcagtgcggtacgcacacagtccatcgcggtgtcgccgccgcccagtaccacgacgttaagtccggcggtattgataaacggctcttccggtagctcttcgagccccatcacctgtttagtgttggcaatgaggaacggcagcgcgtcataaacgcccggcgcatcttcattgggtaaacccgctttcatggaacggtaagtgcctacgccaacgaagaccgcgtcgtattgttccaaaaggctatccaaagagacatctttacccacttcacaattgagttcgaagtgaatccccatcgcgctgaagatttcccgacggcgtgccagcagggatttatccagtttgaaagaaggaatgccgaaagtgagcaagccaccgatttctggatggcgatcgtacaccgtcacccccacgccattgcgggtcagaacatccgcacaggccagccctgccggacctgcaccgataatcgccacccgcttgtccactttggtgacatggcttaagtcaggacgccaacctttcgccaacgcctgatcactaatgtagcgttcaatgttgccgatagttaccgcgccgtgctcatcgcgaatagtacaggcaccttcacacaaacggtcttgcggacaaacgcgtccggtaatttccggcagggtgttggtctggtgagaaagctcgacggcggcgtcgatgtttccggctttcaccagttcaatccactgcggtatatggttatgcagcgggcaggtccattcacaaacgctgtgctcgccgcacttaaggcagcggctggcttcccgttgtgcctggtcggcgcgaaatggcagataaatttcatcaaaaccggttttgcgcgcttcaatcgccagtttatccggctcgccacgcgcgggcgttgcctgcatttgttcgactttactcattaccggcatttcttgcgccgcggtactggcatgccacggttgatgttcctgacgcgcggtgcgcaagcggcgggatttcgccatgccggagagtgcgacgtcagtgaccagttgcagcgcgtccgccgggcaattctcaacacaggcaggaccgttttcgcgccccgcacaaaggtcgcatttatgcgccgtggcttttacttttcctgccgcgacgggtgtcaggacgatttgcatcgtaccaaaaggacaggccaccacgcaggatttacagccaatacacttttgctgattgacctgaatgctgtcatcaacgtggctgattgcgccattagggcagctacgggcgcagggcgcatcttcacaatggtgacaggtcactgcactacgttgctgttgatgtttgataaccgtaattcggggatgaaaatggtgttggctcaggacatgttgctcatcattgtgagccatgacacaggcgatttcacaagcatgacaacccagacattgctgactgttggccataataaaacgattcataacgaccttcttttttggttgtaaaaaccttattctttatatgagtgttgttattacccgacttacaggggaatcggcaatgttcatgtgcccagaataagtaactatttcgctataaactgtggcagatcaaataatcccatcactgactaaattgcgtttcagcgaactggaacattaatgattttttgtggagaagacgcgtgtgattgttaaacgacccgtcagcgccagtctggcccgggcctttttttacattgtgctgctgagcattctttccacgggtatcgctctgctaactctggcgagcagtttgcgcgacgctgaggctatcaatattgccggaagcctgcgtatgcagagttaccgcctgggctacgacttgcaaagtggcagtccacaactcaatgcacatcgccagttatttcagcaggcactgcatagtccggtattaaccaacctcaacgtctggtatgtgccagaagcagtaaaaactcgctatgcgcatctgaatgccaactggctggagatgaataatcggctcagcaagggcgatttgccgtggtatcaggccaatattaataattatgttaatcagatagacctgttcgtactggctttacagcactacgctgaacgcaaaatgctgctggtggtggcgatttccctggctggcggcatcggtattttcacgctggtcttttttactttgcgccgcatacgccatcaggtggttgccccgctgaatcagctggttaccgccagtcagcgtattgaacacgggcagttcgacagcccgccgctggataccaacctgccgaatgagcttggtctgcttgcaaaaacctttaaccagatgagcagcgagctgcataaattgtaccgtagcctggaagcgagtgtagaagaaaagacccgcgatctccacgaggccaagcgtcgtctggaggtgttgtatcagtgtagccaggcgctgaacactagccagattgatgtgcattgtttccgccatattttgcagattgttcgcgacaatgaagcggctgaatatctggagttaaatgtcggtgaaaactggcggattagcgaagggcaaccaaacccggaattgccgatgcagattttaccggtgacaatgcaagagacggtttacggcgaactgcactggcaaaatagtcacgttagtagtagtgaaccgctgcttaacagcgttagcagcatgctgggacgcggtttgtactttaatcaggcgcagaagcattttcagcaattattgttgatggaagaacgtgcgaccatcgcccgcgaattgcacgacagcctggctcaggtactttcttacttacgtatccagttgacgttactgaagcgtagcataccggaagataacgccaccgcacaaagtatcatggccgatttttcccaggcgttgaatgatgcttatcggcagttacgcgagctgttgactactttccgcctgacgctgcagcaggcggatctcccctccgcattgagggaaatgctggatacgttacaaaatcaaaccagcgccaaactgaccctcgactgccgtctgccaaccctggcactggatgcgcaaatgcaggtgcatttgttgcaaattattcgcgaagcggtgctgaatgcgatgaagcacgccaacgccagcgaaatcgccgtcagttgcgtcaccgcgccggacggcaatcacacggtttatatccgtgataacgggattggtatcggtgaaccgaaagaacccgaaggtcattatggtctgaatatcatgcgcgaacgcgcggaacggctaggtgggacgctgacttttagtcaaccttccggcggcggcacgttagtgagtattagctttcgctctgcggagggtgaggaaagtcagttaatgtaatgcctcctactgaccaaagaatacttgcacttaaggttcagtataaaagggcatgataatttacattaactcctttttttctccacgattggctcgtaccttgccgctacagtgaagcaagtcaagcctacaacgatacgcagaaacacgaggtcctcttttaatggcgaatttctttattgatcgccccatttttgcctgggtgctggcaatcctgttgtgtctgacaggtaccctggcgatttttagtttgcccgttgaacaataccccgatctcgcgccaccgaatgtgcgagtgaccgctaactatcccggcgcaagcgcccagacgctggaaaacaccgtgacccaggttatcgagcaaaatatgaccggcctcgataatctcatgtatatgagttctcagagcagtggcaccggtcaggcatctgtcactttaagttttaaagcaggcaccgatccggacgaagccgtgcagcaagtacaaaaccagctgcaaagtgccatgcgaaagttaccgcaggcggtgcaaaatcagggcgtgacggtgcgtaaaaccggcgataccaacattctgaccattgccttcgtctctaccgatggtagcatggataaacaggatattgctgattatgttgccagtaatattcaggacccgttaagccgcgtgaatggcgtcggggatatcgatgcctatggtagccaatattccatgcgtatctggctggacccggcgaaactcaacagtttccagatgacggctaaagatgtcactgatgccattgagagtcagaacgcgcagattgcggttgggcaacttggtggtacaccttccgtcgataagcaggcgctcaacgccaccattaacgcccagagtctgctgcaaacaccagaacagttccgcgatatcaccttgcgggtcaatcaggacggcagtgaggtaaggctgggcgatgtcgccaccgtcgaaatgggggcggagaaatacgattatcttagccgcttcaatggtaagccagcctccgggctgggggtaaaactggcctccggcgctaacgaaatggcgacagcggagctggtgctcaatcgtctcgacgagctggcgcagtatttcccgcatggactggaatacaaggtggcgtatgaaaccaccagctttgttaaagcctccattgaagacgtggtgaaaacgctgctggaagctatcgctctggttttcctcgttatgtatctgttcctgcaaaacttccgcgccacgctgatacccactatcgccgtgccggtggtgttgatgggaaccttctccgtactttacgccttcggttacagcgtcaacaccttaaccatgttcgcgatggtgctggcgatcggtctgctggtggatgacgccatcgtggtggtggaaaacgtcgaacgtattatgagtgaggaaggactcactcctcgcgaagccacacgtaaaagcatggggcagatccagggggcactggtcgggattgcgatggttcttagcgcggtatttgtaccaatggccttcttcggcggcaccaccggtgccatctatcgccagttctctattaccattgttgcggcgatggtgctgagtgtactggtagcgatgatcctcactccggctctgtgtgccacactacttaagccactgaaaaaaggtgagcatcatgggcaaaaaggcttttttgcctggtttaaccagatgtttaaccgcaacgccgaacgctacgaaaaaggggtggcgaaaattctccaccgtagcctgcgctggattgtgatttatgtcctgctgcttggcggcatggtgttcctgttcctgcgtttgccgacgagcttcttaccgctggaagaccgtggcatgtttactaccagcgtacagttgcccagcggtagtacgcaacaacagaccctgaaagtcgttgagcaaatcgagaaatactacttcacccatgaaaaagacaacatcatgagcgtgtttgccaccgttggttctggccctgggggtaacgggcaaaacgtggcgcgaatgtttatccgcctgaaagactggagcgaacgcgacagtaagaccggcaccagctttgccattatcgagcgtgcaacgaaggcgtttaaccaaattaaagaagctcgcgttatcgccagcagcccgccagcaattagcggtcttggtagttctgcaggttttgatatggagttgcaggaccacgctggagcgggtcacgatgcgctgatggcagcacgtaatcagttgctggcgctggcggcggaaaacccggagctaacccgtgtgcgccataacggcctcgacgacagtccgcagttgcagattgatatcgaccagcgtaaagctcaggcgctgggcgttgctatcgacgatattaacgacacactgcaaaccgcctggggtagcagctatgtgaatgactttatggatcgcggtcgcgtgaagaaagtctatgtgcaggcagctgcgccgtatcgcatgctgccagatgacatcaatctctggtatgtccgaaataaagatggcggcatggtgcccttctctgctttcgcgaccagtcgctgggaaacaggcagcccgcgtctggaacgctataacggttattctgcggttgagattgttggggaagccgcaccgggggtcagtaccggtacggcgatggatattatggaaagcttagtgaagcagctgccaaacggctttggtctggagtggacggcgatgagctatcaggagcggctttccggcgcgcaggctccggcgctgtacgccatttccttgctggtggtattcctgtgtctggctgcgttgtatgaaagctggagcgtgccgttcagcgtaatgctggtcgtgccgctgggggtaatcggcgcgctgctggcaacctggatgcgcgggctggaaaacgacgtttacttccaggtgggcctgttaacggtcattggtttaagcgcgaaaaacgccatcctgatcgtcgagtttgctaacgagatgaaccaaaaaggccacgacctgtttgaagcgacgctccacgcctgccgtcagcgtttacgcccgattctgatgaccagcctggcatttatcttcggcgtattgccaatggcaaccagcacgggtgccggttccggtggtcagcatgcggtgggtactggcgtaatgggcgggatgattagcgccactattctggctatttacttcgtgccgctgttctttgtgctggtgcgccgccgcttcccgctgaagccgcgcccggaataagcaataaaaaaggcgacatgccaatgtgtcgcctttttcaactttccgattaagaacctgctcagcgggttcttgctgtttgtactttgtctcaggaattacttacgaagcataacttcgataaagtctttccagttccccagttcacgttcaatcataacaacctctcttataattatgggtattctacggaaacaatataccgtggtgaagctaatttactcgattgctgcgatgactacctccgggggacaaatcttatgtaaatactatggtcctgcggtgatgatttgtatgtgatacacagcaacatttcgagatattcatacggcatctaatactgatttaattctggttaaaatacagacagataacaagatgaatattcttaatgtttacgttaaaaatgtttaatattatttaatagttgttaatttgaatacttcgataatgttatatttcctgataatcatttgcaggcaaaatgttttcacccttaaatgagtatttattctcataaatcgaaaaaggattcattatggttacactttacggtatcaaaaattgtgacaccattaaaaaggctcgccgttggctggaagccaataacatcgactatcgttttcatgattaccgcgtcgatgggctggacagcgaattattgaacgattttatcaacgaattaggctgggaagcgttactcaacacccgtggtacaacctggcgtaaactggacgaaaccacccgcaataaaatcaccgatgcggcctctgcggcggcattaatgactgaaatgcctgcaattatcaaacgtccattgctctgcgtgcccggtaagcctatgctgctgggtttcagtgattccagttatcagcaatttttccatgaggtgtaatctatgagctgcccggttattgagctgacacaacagcttattcgccgcccttccctgagtcctgatgatgcaggatgccaggctttgttgattgaacgtttgcaggcgatcggttttaccgttgaacgcatggactttgccgatacgcagaatttttgggcatggcgtgggcagggtgaaacgttagcctttgccgggcataccgacgtggtgccgcctggcgacgccgatcgttggatcaatcccccgtttgaacccaccattcgtgacggcatgttattcgggcgcggtgcggcagatatgaaaggcagcctggcggcgatggtggtggcggcagaacgttttgtcgcacaacatcccaaccatacggggcgactggcatttctgatcacctctgatgaagaagccagtgcccacaacggtacggtaaaagtcgtcgaagcgttaatggcacgtaatgagcgtctcgattactgcctggttggcgaaccgagcagtatcgaagtggtaggtgatgtggtgaaaaatggtcgtcgcggaagtttaacctgcaaccttaccattcatggcgttcaggggcatgttgcctacccacatctggctgacaatccggtacatcgcgcagcacctttccttaatgaattagtggctattgagtgggatcagggcaatgaattcttcccggcgaccagtatgcagattgccaatattcaggcgggaacgggcagtaacaacgttattccgggtgaactgtttgtgcagtttaacttccgcttcagcaccgaactgactgatgagatgatcaaagcgcaggtgcttgccctgcttgaaaaacatcaactgcgctatacggtggattggtggctttccgggcagccatttttgaccgcgcgcggtaaactggtggatgcggtcgttaacgcggttgagcactataatgaaattaaaccgcagctactgaccacaggcggaacgtccgacgggcgctttattgcccgcatgggggcgcaggtggtggaactcgggccggtcaatgccactattcataaaattaatgaatgtgtgaacgctgccgacctgcagctacttgcccgtatgtatcaacgtatcatggaacagctcgtcgcctgatgagtggttctgcaagaggaaataagcatggactggctggctaaatattggtggattctggtgattgtctttttggtaggcgtcctgctgaacgtgattaaagatctcaagcgcgtcgaccataagaaatttctcgccaacaagccggagcttcccccgcatcgtgatttcaacgataagtgggacgatgacgacgactggccgaaaaaggatcaaccgaagaagtaagctgagtgctcaaccgtaggccggataaggcgttaacgccgcatccggcaatggtgaacgatgcctgatgcgacgctcacgcgtcttatcaggccaggtaatctgtcttttacatcatttcaatcacatcatcatcgccaggcttaccgccacttagcgcttcgtcgaaataatgtttcggaatggtataacgcaagtgatccagggcaaattgcatactgcgattgtcgatcgcatggcctaaatcctccacgatatccagcgtcacgtcaccaccggcactgattaacgcttcctgcgccgcaaccgcatgcgccagatcgataaccggatcttcaccgccatgaatcaggtgaattgtcgtggctgtagacgcagtttccggcaggctcgcatagcgtccgttaaaagcaatgacgcgactagcaaggcccggttcggctttaatgctctccagcaccataatcgcgccttgagagaaaccgatgagcgccgtggcgttagcccctactccgctctgtttctgccagtagcgcaccgtttcaataaacgtcggcatgatcgcatccacacgcgcctggcgattatcttccgtaataccctgcacgctaaaccactgacgccccgccggattaccgctcggctccgcgccaccgacactcaccaccagcgcatcaggaaacagcggtgcaaaccagttgcctatttcccccattgccaccgggttatccccgacaccgtggaaaagcagtaacaactgttgcgcaggtttatccgggctttgaacaacaaaatggtcatgtttcatggcgaactccttaactgatgtcattaattttacgccgctgactcacaatgaccatgagataaaattgaaggagtcagtgaaataattgccattgcgttatgcgatcgcgcagacgctcagtgcgaacatcattaagtgcgaacagcgcctgcgcggcctcttcccgctgacggaccagtaacatcttgcggccactaagtttaagtgtggtacataactgcgcatcactggcgtttttctgtaaacgcccacgcagcgccggtaatgccagttcactggtttgtaacagacgcaataagcaacctaagctcgttaatagcggacgatgagcgaaagcaaaaccggccagttcaagccagtcgtcgtcagaaaggacggcatcgtttagtggatcaacaggaagcgtttcgccattccactgcgcgagagcttgcgcatcgcgacgtaaacggtaatgctcacgttcagccagctgtttacccgcatcactcatcggtaacagcgccatcgccgtatagcaaccgctgctggcttcccgatgattacccatccgcaccagcacaaaaccgcagcgttgccagaaacgccataactccccggtgtaaccaaaactcacgctaagatagtcgaggtcttgcgtatattgcaaagcaccagcaataagttgccgccctgtgccttcccgctgacgagccggatgaactgctatccggctgacccgccgtccacgcaatgtcgccgccagtggattgttgccgtgcgccgccaggctctgggccaccagattaccccgcgggcgacgaaaacctgcccataccgcctgactgagttgttgagataatccaccctcatccaccagccacagcgccccggcaatctcgttttcgccagccgcctgtaaaaaatgttgccctggtgcatccatcatccggcgtaaatccagcgggctagtccgatagtgcgcaccagacaagagctgataaacctttaacggcgtttctggatcgctttgccataacgtctgttcaaatgcggaaatgacaatattgccttgtggtgtatgggtgaagttttcatcgtcaaaaaccagtgcctcgctgaccattttttccagcgggcatccctgcgcccagcggatcggctgttgcagttcaaaacggtgtaaatgcggaaagcgagcgcaaaatttcagcaaaaaaccacgtccggtgccttcgtagccctgcaccgtagtggttaacaacgttcgaggaaaacggcttaccagttgatgcaacaatggcgcaggtatggctgcggcttcatcgaccaccagccagtcggcttgctcatcgctggctaacaaggcatccggcgcaataaagcgaaacttctcgcccgcaaattgtgccagtacatccgtactcgcttttgcgggcgcggtgacaatcgctctgcccgcaatacgagaaatgagttgccctgccaacgcgctcttaccgcgcccacgcgcagccgttaccgctgccacgcccggcggcatggtcattagctgctttaagagttgctgttgttctggttgtggtgcgccagtcgcggggtaccagtcagtacggggagtaaaatgcgccaagctgaatggctggttttgccgccagaggatagcctcgttatccgccgtaagtacgcgtttgagatgctggacaaaatgcggcgtcgcaatagggtcagggcaatcactccagcgcaggctgtcggcatcaggttggttttcccactcttcccatacagggagtaacaaaaccagccagcttcccgctttcaacgttccgctaagtgcggcaaaggcagcggcatcaaagccgtggcgggcgtcgaataccgcatgccggaactcgcgcccaagtaaagtttgtagtgcgctgggagaacagtggttttcagcatctggccgcgggctaatccacagccagtcgccaggtaaggcatcacgcaacttaagagtatgctcaaaacaccaaccctcttccccgctcaacaccagcaagcggcggatcccttcacgtttcatttgcgctgttaatgtgtgaagcgcagtcagttcagccatccctgccccggaagttaaatgcttttaccaaaagtattgcattgtgccggatcgccgctgtcgaaaccacgtttaaaccagctgtagcgttgctgagaagtgccatgagtgaaactgtctggtactactcgcccctgactttgctgttgtaaacggtcatcgccgatggcctgcgccgcgttcagcgcctcttccagatcgccggtttccagaacgccttgctgctgcatactatgcccccagacaccggcaaaacagtcggcctggagttccatacgcacagataagcggtttacttccgcctgcgtcgcgttttgttgcagttgacgaactttcggctcgatgcctaacagtttctgcacatgatgaccgacttcatgggcgataacgtacccctgggcaaaatcgccatccgcgccaagtttgtctttcatgtcatcatagaaggagagatcgatataaaccgtgccatccgccgggcaatagaacggccccattatggactggcccgccccgcagccggtacgcgtcattccacggtacatgaccagcttcggttgctgataggtcttacccatcttctcgaactgttgtccccaggtgtcttccgtggttgccagaatcacgctggtgaattttgcggcttcgtcttcatttgggctaatactccgcgtactttgttgttgggaaaccggctgcccggtcatcaacccggttaaatcaacaccatagtagcctgcaaccagcacgactatcagtaaaatcagcccgcctttaccgcttggcaggcgaaaaccgggaccgcccatagatggaccaccagagctgttgcgcctgtcttcaacattgtcactttcacgtcgcccttgccaacgcatagatacctcaacaatatattcattatagaaatgatcgtaggtggttcagaggaagattaccacaggaaagcgggatgaaatggcggaggaatgagcgttcaatgcatatattccgagagcggttgtcttgccgtgccagctgcacggcaagatgatgaacagaaaaatcagtccagctgtacacccaggcggcgggcgacggcttcataggcttcgatcaggccaccgaggctctggcggaaacggtctttgtccattttctccagcgtttctttgtcccacaggcggctaccgtccggggagaactcatcacccagtaccacttcgcctttgtacagaccaaattccagcttgaagtcgaccagaatcagaccagcatcatcgaacagttttttcagcacgtcgttcgctttgtaggtcagctctttcatacgcgccaggttctctttgctcacccagccaaaggtttcgcagtaagattcgttgaccatcggatcgtgcatggcgtcgtttttcaggaacagatcgaacagcggcgggttcagctcaataccttcttcgattccaagacgtttcaccagagagccagcagcacggttacgcacgacacactcaaccggcaccatatccagctttttcaccagacattcggtatcggagagcagacgctccatttgagtcgggatacccgcttcagccagtttgctcataatgaagtagttgaacttgttgttcaccatacctttgcgatcaaactgctcaatgcgcgcgccatcccctgcactcgtatcattgcggaattcgagcaccaacaggtccgggttttccgtgctgtatacggttttcgctttaccacgatacaactcagcttgcttttgcatctttatcactcctgggtgtgaattaacgttttaaaatcttttgctgtctggtgtgccggatgttttgtcggatgcggcgtgaacgccttatccgaactacgtccgacaaacaaatttcgtgcgaattaccgctaaaatcgcgttttcctgcagacgcacacgtttgcgtatcatatcagaaaaaagggccggatgattccagccctgtatttttacttgctaaacgcagcctggaagacagctaccagcgcgtcgttctgactctgagtcagagtatgacctttcggatcgatgaactgtaggctgctgcggttatctaaatcgccaacctgcagtttatagtcaccggatgccaggcctggatcgctcgcgcccagttcctgccagtcgctgtcagacagcggcttataagttacggccatgttgccctggctacgggtgctgtcggtcactttcatgcccactttttccagcgccgctggcagacgttgccaaaccacattgaacggcccgcgtacgaccagcattggtaaaccggtgtcatcagctgcactttgtacgtccatagtggtggaggcacgattttgcgcagcgttcgcggcgtcagtggcagatttatccagaccggcggaaataacgttcatcatctccgtgctgtaacgctgcatggaagccgcgtctgcaaccggtttgcccgcctgttccaggttcagcagtttaaccgtaaccgcctgctgataaccctgcggcttaacagagatttgataacgaccacgatactgctcgtcttcgtccagacggttccattgtacccaatcggtggtcagtgtctgaccagcatcatcacgttgggtgatggtgtagtttttcgcctgcagcacgctaaccacctgcggccacagagtattgccacgaccattttccaccagcaaactagcggtatcgcccgtgaactgggtacgcgcgccagaaaccagtgccagcggctgggctggtggacgaatgtccagcgccttaccgacagcaccactaccgttggtcaccgggattgcataatcaccggaggtcaccggcaaaatcattccagccggggcatgaagctccgcaagcggtgccgcttccaggtaggcttcatcaccactgacctgacgcttatagcgactgtcagaactacaggcagcgagtaataaaacaaggctaacacccgcaacctttgccaggcggctcttttgaacagagtaagccatcaaatctccctaaactttacagcaaaccggcatgcttaagcgccgctctgaccgtctcacgaccactgtcggtgattggtgtcattggcaggcgcagcgtatcggtcgccacaagacccagttccttacatgcccatttcaccgggattggattgggttcgacaaatagtttgttgtgtaatggcatcagacgctgattaataacgcgtgcctcggcaaaatgcccttctgctgccagtttgcacatctgggccatatcacgcgctgcgacgttagccgtaacggaaataaccccatgaccgcccaattgcatgaagtccagcgcgctcgcatcatcgccgctcagcagaacaaaatcatcactaaccagctctttgatctggtttacacgcgttaagttccctgttgcctctttgattccgataatattttttactttcgccagacggcccaccgtttccgggagcagatcgcagccagtacgggacggcacattatacagaatttgcggcaggtcagtatgctcagcgatggctttgaaatgctgatacaaaccttcttggctcggacgattgtagtaaggggttaccgtcaggcagccgacgataccactgtcattgaagcgctgcgtcaggctaatggcttccgcagtagcgttagcgccggtcccggcaattaccggaatgcgcccatcagccagatccagcgtcatcatcaccacatcagcatgttcgtcatgatttaaggtagcggactcgccagtggtgccaacagaaacgatcgcgctagtaccgctggcgacatgataatcaatcagttttttcaagctagcccgacagacattacctttttcatccatcggagtaacaatcgcgacaatacttcccgtgaacatgggccatcctctgtgcaaacaagtgtctcaatggtacgtttggtatggcattaaaagcaagcagacagaaccgttctgattgttgtatgcatgtttttttatgctttccttaagaacaactcaccccttaaaggaataaccagtttgacactgagtagccaacattatctggtgatcactgcgttgggtgccgatcgccctggaattgtgaacaccatcacccgtcatgtcagtagttgcggctgtaatattgaagacagtcgcctggcgatgctgggagaagagttcacgtttattatgctgctttccggtagttggaatgccattactctgattgaaagtacgttaccgttgaaaggtgccgaactggatcttttaatcgtgatgaagcgcacgacggcgcgtccgcgtccgccaatgccagcatctgtctgggttcaggtcgatgtggcagactccccgcatttaattgaacgcttcacagcacttttcgacgcgcatcatatgaacattgcggagctggtgagccgcacgcaacctgctgaaaatgaacgggctgcgcagttgcatattcagataaccgcccacagccccgcatctgcggacgcagcaaatattgagcaagcgttcaaagccctatgtacagaactcaatgcacaaggcagtattaacgtcgtcaattattcccaacatgatgaacaggatggagttaagtaatgaatccactgaaagccggtgatatcgcaccgaaatttagcttgccggatcaagacggagaacaagttaatttgaccgacttccagggacagcgtgttctggtttatttctacccgaaagccatgacccccggctgtaccgtacaggcctgcggcttacgcgataacatggatgagttgaaaaaagcgggcgttgatgtgctgggtatcagcaccgataaacccgaaaaactctcccgttttgcggaaaaagagctgcttaactttacgctcctgtctgatgaggaccaccaggtgtgcgaacaattcggcgtctggggtgaaaagtccttcatgggcaaaacctacgatggcattcatcgcatcagcttcctgattgacgctgatggcaaaatcgaacatgtctttgacgatttcaaaaccagcaatcaccacgacgttgtgctgaactggctgaaagaacacgcctgattactttgctccattccgtgctggctgcgcttgcggccagcatacctcacttctcgtgatcaagatcacattctcgctttcccctgcgacacgggtgtcgaatccattttttgctgaacgttaatgaccatcatttttgtaccgttcagaatccagttaatacataacttattgaatatattgagttaatcagaatggcatcctttatgcaatatgaaatgcaatgtttcatatcattttcaaggagccgacatgaaccgctttgtggtggccgaaccactgtggtgtacaggatgtaatacctgtctcgctgcctgtagcgacgtgcataaaacgcaaggtttacagcaacacccgcgcctggccctggcgaagacgagtacaatcactgcccctgtcgtgtgtcatcactgtgaggaagccccttgcctgcaggtctgcccggtcaatgccatctctcagagggatgatgcgatccaactcaacgaaagcctctgtattggctgcaagctttgcgccgtggtctgcccatttggcgcaatcagcgctagtggaagccgtccggtgaatgcccatgcgcaatatgtttttcaggctgaaggcagtctcaaagacggcgaagaaaacgcgccaacacaacatgctttgctgcgctgggaacctggtgtccagaccgtcgcggtgaaatgcgacctgtgtgatttcttgccagaaggtccggcctgcgttcgcgcttgcccgaatcaggcgttacggctgatcaccggtgatagcctgcaacgtcagatgaaagaaaaacagcgccttgccgcaagctggtttgccaatggcggggaggatcccctttccctcactcaggagcaacgctaatggatgccctgcaattattaacctggagcctgattctctatctgtttgctagtctggctagcctgtttttactcggtctggacagactggctattaagctttccggcatcacaagcctggtgggcggcgtgattggcatcatcagcggaattacgcaattacatgctggtgtaactttagtcgcccgttttgcccccccttttgaatttgccgatttaaccctgcgaatggatagcctcagcgcatttatggtgctggttatctccttgctggtggtggtttgttctctctatagtttgacttatatgcgcgaatacgagggcaaaggcgcggcggcgatgggcttctttatgaatattttcatcgcaagcatggttgccctgctggtgatggacaacgctttttggttcatcgtgctgtttgaaatgatgagcctgtcttcctggtttctggtcattgccaggcaggataaaacgagcatcaacgctggcatgctctacttttttatcgcccacgccggaagcgtgctgataatgatcgccttcttgctgatggggcgcgaaagcggcagcctcgattttgccagtttccgcacgcttagtctttctccggggctggcgagcgcggtgttcctgctggcctttttcggttttggcgcgaaagccgggatgatgccgttgcacagctggttgccgcgcgctcaccctgccgcaccaagccacgctagcgcgttgatgtctggcgtaatggtcaaaataggtattttcggcatcctgaaagtagcgatggatctgctggcgcaaacgggtttgcctctgtggtggggcattctggtgatggcgatcggcgcaatctccgcgctcctgggcgtgctatatgcgctggcggaacaggatatcaaacggctgctggcctggagtaccgtcgaaaacgtcggcattattttgctggcagtcggtgtggcgatggtcggtctgagtctgcacgacccgctgctcaccgtggttggactgctcggcgcactgtttcatctgctcaaccatgcgctgttcaaagggctgctatttctcggcgcgggagcgattattagccgtttgcatacccacgacatggaaaaaatgggggcactagcgaaacggatgccgtggacagccgcagcatgcctgattggttgcctcgcgataagcgccattcctccgctgaatggttttatcagcgaatggtacacctggcagagcctgttcagtctaagtcgtgtggaagccgtagcgctacaacttgcgggtcctattgctatggtaatgctggcagtcactggtgggctggcagtaatgtgcttcgtaaaaatgtacggtattactttctgtggtgcgccgcgcagtacacacgctgaagaggcacaggaagtgccaaatacgatgatcgtcgccatgctactgctcgcggcactctgcgtattaattgcgcttagtgccagttggctggcaccgaagataatgcatattgcccatgcgtttaccaatacccctcccgccactgtcgccagcggaatagcacttgtacccggcacgtttcatacacaggtcacccccagtttactgttgctgttactactggcgatgcctttgctgcctggcctttactggctgtggtgtcgtagccgccgcgcagcgtttcgtcgcacaggagatgcctgggcatgcggctacggctgggaaaatgcgatggccccgagtggcaatggcgtgatgcagccgctgcgtgtggtcttttctgcgctatttcgtctacgacaacagctcgaccctacgctgaggctaaataaaggtcttgcgcacgtcaccgccagggctcagagcacagaacccttctgggatgagcgggtgatccgccccatcgtgagcgccacccaacggctggccaaagaaatacagcatctgcaaagcggcgactttcgtctctattgcctgtatgtggtcgccgcactggttgtgctgctaatcgctattgccgtctaaggaaatcaccatgagacaaactctttgcgacggatatctggtcatttttgcgttagcacaggccgtgattctgctgatgctaaccccactttttacgggtatttcccggcagatacgcgcgcgtatgcactcccgccgcgggccggggatctggcaggattatcgcgatatccacaaactgtttaaacgccaggaagttgcgccgacatctagtggtctgatgttccgcctgatgccgtgggtattaatcagcagcatgctggtgctggcgatggccttaccactgtttattaccgtttccccttttgcgggcggcggcgatctgatcacccttatctatcttcttgccctgtttcgttttttctttgctctttccgggctggataccggaagtccgtttgcgggagtcggtgccagtcgcgagttgacgctcggcattctggtcgaaccaatgcttattctcagtctgctggtattggcgctgatagcaggttccacgcatatcgagatgatcagcaatacgctggcgatgggctggaacagcccgctaaccaccgtactggcgttactggcctgtggttttgcctgcttcattgagatgggaaaaattccctttgatgttgctgaagcagaacaggaattacaggaaggcccgctgaccgaatattccggtgccgggctggcgctagcgaaatgggggctggggctgaaacaggtcgtgatggcaagtctgtttgtggccctgtttctgccctttgggcgcgcgcaagaactttctctcgcctgcctgctgactagtcttgtcgttacgctgctcaaggttttgctgatttttgtactggccagtatcgcagaaaacacgctggcacgcgggcgttttttactcattcaccatgtgacctggcttggcttcagccttgctgcgcttgcatgggtcttctggttaaccggtctgtaaggagcactgacggaatatggaaaatcttgctctgacgacgttattgctgccttttatcggcgcactggtcgttagctttagcccacaacgtcgggccgccgaatggggggttttgttcgccgcgctgaccacgctgtgcatgttgagtctgatctccgcgttttatcaggccgataaagttgccgtcacgttgacgttggtcaacgtgggggatgtggcgttgtttggcctggtcattgatcgcgtgagtacgctgattctgtttgtggtggtgtttctcggtttgctggtcacgatctactccacgggttatctgacggataaaaatcgcgaacacccgcataacggcacgaatcgttattacgcatttttactggtgtttatcggcgcgatggcgggactggtactctccagcacgctgctcggtcagttgttgttttttgaaattacaggcggctgctcctgggcgttgatcagttattaccagagcgataaagcgcagcgtagtgcactaaaagcgttacttatcactcatatcggcagcttggggttgtatcttgccgccgccacgctgtttttgcagaccggaacgtttgcgcttagcgcgatgagcgagttacacggcgacgcacgttatctggtttatggcggcatcctgtttgccgcgtgggggaaaagcgcccagctaccgatgcaagcgtggctaccggacgcaatggaagcgccaacaccgatcagcgcctatctccacgccgcaagcatggtgaaagtgggcgtttacatttttgcccgcgctattatcgacggcggcaatatcccgcatgtgattggcggcgttggcatggtcatggcactggtcaccattctttatggctttctgatgtatttgccacagcaggatatgaagcggttgctagcctggagcaccatcactcaacttggctggatgttcttcggcttgagcctctccatcttcggcagccggctggcgctggagggcagcatcgcctacatcgtcaaccacgcgttcgctaaaagcctgtttttccttgtagcaggtgcgctgagttacagctgcggcacgcgcttgttgccgcgtctgcgtggcgtattgcacaccctgccgttgccaggcgtgggtttctgcgtggcagcgctggcgattaccggcgtgccgccgttcaacggcttcttcagtaaattcccgctgtttgctgccggttttgcgttgagtgtggagtactggatcctgctgcccgccatgattcttctgatgattgaaagcgtcgccagtttcgcctggtttattcgctggtttggtcgcgttgtgcctggcaaaccgagcgaggccgtcgccgatgccgcaccgctgccaggaagtatgcgcctggtgttgattgtactgattgtgatgagcctgatttccagcgtaatcgccgcgacctggttgcagtaaggagatgatgaatgaccggttctatgatcgtaaataatctggcgggactgatgatgctgacaagcctgtttgtgattagcgtcaaaagctatcgcctgagttgcggattttacgcctgccagagtctggtgctggtgtctattttcgccactctcagctgcctgttcgccgcagagcaactgctgatctggtccgccagcgcctttatcaccaaagtgctgctggtaccgttaatcatgacttacgctgcacgaaatattccccagaacatcccggaaaaagcgttattcggtccggcaatgatggcactgctcgcggcgttaattgtcctgctttgcgcatttgtcgttcagcccgtgaagctaccgatggctaccgggctgaaaccggcgctggcggtagcgttaggtcattttctgcttggcctgctgtgcattgtcagccagcgcaatatcctgcggcaaatttttggttactgcctgatggaaaacggctcccatctggtgctggcgcttcttgcctggcgagcaccggaactggtggaaataggtatcgctaccgacgccatcttcgccgtcattgtgatggtgttactggcaagaaaaatatggcgtacccacggcacgctggacgtgaacaacttgaccgcgctgaagggataatgagatgagttattctgtgatgttcgctttactcctgctcacgccgctgctttttagcctgctctgttttgcctgccggaaacggagactttctgcgactcgcacggtgaccgtattacatagcttagggatcacactgctgctgattctggcactctgggtggtccaaactgccgctgatgcaggagaaatattcgctgcgggactgtggcttcatattgatggtctgggcggtttgttcctcgccattcttggtgtgattggctttctcaccggtatttacagcattggctacatgcgtcatgaagtggcacacggcgagcttagtcccgttacgctgtgcgattactacggtttcttccatctgtttttgttcaccatgctgctggttgttaccagcaataacctgattgtgatgtgggcggcgatcgaagccaccaccttaagcagcgcgtttctggtaggcatttacggtcagcgtagtagcctggaagctgcatggaagtacatcattatttgtactgttggtgtcgcttttggtctgttcggtaccgtgctggtatacgccaacgccgccagcgttatgccgcaggcagaaatggcgatattctggagcgaggttcttaagcaaagctccttgcttgacccaacattaatgctgttggcctttgtgtttttgctaattggctttggtaccaaaaccgggctatttcccatgcacgcctggctgccggatgctcacagtgaagcgccgagtccggtcagcgccctgctctccgccgtattgctgaactgcgcgctgttggtgctgattcgctattacatcattatttgccaagccatcggcagcgatttccccaaccggttgttgctcatcttcggcatgttgagcgttgccgtggcggcatttttcattctggtacagcgggacattaagcgtctgctggcgtactccagcgtggagaacatggggctggtcgcggtggagctaggcattggcgggccgctgggaatttttgccgcgctgctgcacatcttaaaccacagtctggcaaaaacgctgctgttctgcggttccggcaatgtactgctcaagtacggcacgcgcgatctcaacgtcgtctgtgggatgctcaaaatcatgccatttaccgccgtgctgtttggcggcggtgcgctggcgctggcagggatgccgcccttcaacatttttcttagcgaatttatgaccattaccgccggactggcacgtaatcacctgctgattatcgtcctgctgttattgctgttaacgctggtgctggcgggcctggtacggatggctgcgcgggtgttaatggcgaaaccgccgcaggccgttaaccggggtgatctcggctggttgaccaccagcccaatggtgattctgctggtcatgatgctggcgatgggaacgcatattccacaacctgtcatcaggatcctggcgggcgcttccactatagtcctcagtgggacgcacgatctgcctgcacaacgtagcacctggcatgattttttgcctagtggcaccgcatctgttagcgagaaacacagtgaacgttaatagtagcagtaatcgtggcgaagcgattctcgccgccctgaaaacgcagttccccggcgcggtgctggatgaagagcgacaaacgcctgaacaggtcaccattacggtgaaaatcaatctgctgcctgacgttgtacagtatctttattatcaacatgatggctggcttccggtcctgtttggcaacgacgagcggacacttaacggtcattacgcggtttattatgcccttagtatggaaggggccgaaaaatgctggattgtggtgaaggcgctggtcgatgccgacagtcgggagtttccgagtgtcacaccgcgcgtccctgccgcggtctggggcgagcgagaaattcgcgatatgtacgggctgattccggttggcctgccggatcagcgtcgcctggtgttgcccgatgactggccggaagatatgcatccgctgcgcaaagatgcgatggattatcgactgcgccctgaaccgacgactgattccgaaacgtatccgtttatcaatgagggcaacagcgatgcgcgggtgatccctgtcggcccgctgcatatcacctccgatgaaccgggtcacttccgcttgtttgtggatggcgagcaaattgtcgatgctgattaccgcctgttttatgtccatcgcggcatggagaaactggcagaaacgcggatgggctacaacgaagtgaccttcttaagcgaccgcgtgtgtgggatttgcggttttgcccacagtgtggcctataccaatagcgttgaaaatgcactggggattgaggtgccgcaacgagcacatactattcgcagcattctgctggaagtcgaacggctacacagtcatttgcttaaccttggcctctcctgccatttcgttggttttgataccggctttatgcaatttttccgcgtgcgggaaaagagcatgacgatggcggaattgctgatcgggagccgtaaaacctacggtctgaatctgattggtggtgttcgccgcgatattctcaaagagcaacgtctgcaaacgctgaaactggtgcgcgagatgcgcgccgacgtgagcgagctggtagagatgctgcttgctacgccgaatatggaacaacgcactcagggcattggcattctcgaccgacaaatcgcccgtgatttgcgctttgatcacccctacgccgactacggcaatattccaaaaacactgtttacctttaccggcggcgatgttttctcccgcgtgatggtccgtgtcaaagagacgtttgatagcctggcaatgctggaatttgccctcgacaacatgccggataccccactgctgaccgaaggctttagctataaacctcacgcattcgcgctgggctttgttgaagcgccacgcggtgaagacgtgcactggagcatgctcggtgataaccaaaaattgttccgctggcgctgccgtgccgccacctacgccaactggccggtgttgcgttacatgctgcgcggcaataccgtttctgacgcaccgctgattatcggtagccttgatccctgctactcctgtaccgaccgtgtgacgctggtagatgtgcgcaagcgccagagtaaaaccgtgccgtataaagagatcgaacgctacggcattgatcgtaaccgtagcccgctgaagtaaggacagaagatgctgaagttactgaaaactattatgcgcgccggaaccgcgacggtgaaatatcccttcgcgccactggaggtcagccctggctttcgcggaaaaccggacctgatgcccagccaatgtattgcctgcggtgcctgcgcctgtgcttgtccggcaaatgcgctggctatccagaccgacgaccagcaaaatagccgcacctggcagctctatctggggcgttgtatttactgcggacgttgtgaagaagtgtgcccgaccagagccatccagcttaccaataactttgaactgaccgtcaccaataaagccgatctctatacccgcgcgacgttccatctacaacgttgcagccgttgcgaacgcccgtttgccccgcaaaaaaccatcgcactggctgctgaattgttagcacagcaacaaaatgcgccacaaaaccgcgaaatgttgtgggcgcaagcgagcgtctgcccggaatgcaaacaacgcgcgacgctgatcaacgacgatacagatgtactgctggtggctaaggagcagctatgagtccagtgcttacacaacatgtcagccagcccatcacgctggacgagcaaacgcaaaagatgaagcggcatttgctacaggatatccgtcgcagcgcttacgtttatcgcgtcgattgcggcggctgcaacgcctgtgaaatcgaaatttttgctgccattacaccagtattcgacgcagaacgttttggcattaaggttgttagtagtccgcgtcacgccgatattttgttatttactggcgcagtcacccgggcgatgcgtatgcctgcacttcgggcgtatgagtctgcccccgatcataaaatttgtgtttcctacggcgcgtgcggtgtcggcggcggtattttccacgatctctacagcgtctggggcggtagcgacaccattgtccccattgatgtttggatccccggctgcccgccaacaccggccgccaccattcacggtttcgccgtggcgctcggtttgctgcaacagaagattcacgctgtggattatcgcgatcccaccggggtgactatgcaaccgttgtggccgcagatcccgccaagtcagcgtatcgccattgagcgagaagcgcggcggctggcgggctatcgtcaggggcgagaaatttgcgatcggctcctgcgccatttaagcgacgatcctacaggaaatcgggttaacacctggttgcgcgatgccgacgatccacgtctcaatagtatcgttcagcaactctttcgcgtactccgggggttacatgactgaagagtgcggggaaattgttttctggacgctgcgaaaaaagtttgtcgccagtagcgacgagatgccggaacacagctctcaggtaatgtattacagcctagctatcggccatcacgttggcgtgattgattgtctgaatgtcgccttccgctgcccactgacggaatacgaagattggcttgcactggtcgaagaggagcaagcccgacgtaagatgctgggggtgatgacttttggtgagattgttattgacgccagccacaccgccctgttgacccgggcattcgcgccactggcggatgacgcgacgtctgtgtggcaggcgcgtagcattcaattcattcatctgttggatgaaattgtgcaggaaccggccatctatctgatggccagaaaaattgcgtgagaaggatttctcattaataaggactgttgatggctatgagtgacgaggcgatgtttgccccgccacaaggaataacaattgaagcggtaaacggaatgctcgcggagcggttagcacagaaacacggcaaggcgtctttattacgcgccttcatcccgctgccgccgccgttcagcccggtacaacttattgaactgcatgttctcaaaagcaacttctattaccgctaccatgatgatggcagcgatgtgacggcaacaacagagtatcagggcgagatggtcgattatagccgtcacgccgtccttctcggcagtagtggaatggcggagctacgctttattcgcacccacggcagtcgttttacttcccaggattgcacactgtttaactggctggcgcggataatcaccccggttctgcaaagttggctcaatgatgaagaacagcaggtggcgctgcgtttgctggagaaagatcgcgatcatcatcgggtactggttgatattactaatgcagtgctgagtcatcttgatctcgacgatctgatcgctgacgtcgctcgtgagatccatcattttttcggtctggctagtgtcagtatggtactgggcgatcatcgaaagaacgagaagttcagcctgtggtgcagcgatctttctgccagtcattgtgcgtgtctgccacgctgtatgcctggcgaaagtgtattgctgacacaaacgctacaaacccgacaaccgaccttgacgcaccgtgcagatgatctgtttctctggcaacgcgacccgttattactcttacttgcatctaacggctgcgaatctgcgctccttataccgcttacctttggcaaccatacaccgggtgcattgttgctggcgcatacctcttccactctctttagtgaggaaaactgccagctactacaacacatagccgatcgcatcgctattgccgttggcaatgccgatgcctggcgtagcatgaccgatttgcaggaaagtttgcagcaagaaaaccaccagcttagcgagcagctccttagcaatctgggcatcggtgacattatctatcaaagccaggcaatggaagacctgctccagcaggtagatattgtggcgaagagcgacagtacggtgttgatttgtggtgaaaccggaactggcaaagaggtgatcgccagagcgatccatcaacttagcccgcgacgcgacaagccgctggtcaaaatcaactgcgctgccatccccgccagtcttctggaaagtgagttattcggtcatgacaaaggggcgtttactggtgcgattaatacccatcgtggtcgttttgaaattgccgatggcggcacgttgtttctcgatgaaattggcgatctgccgttagaacttcagcctaaactgctgcgcgtattgcaggagcgggagattgagcgtctcggcgggagtagaacgatcccggtgaatgtcagagtcattgccgccaccaaccgtgatttgtggcaaatggttgaagatcgccagtttcgcagcgatctcttttatcgcctgaatgtcttcccactggaattgccgccgctacgcgaccgtccggaagatatccctcttttagcaaaacatttcacgcaaaaaatggcgcgccatatgaatcgcgcaattgacgccatcccgaccgaggcactacgccagttgatgagctgggattggccgggcaacgtgcgcgagctggaaaacgtgattgagcgggcggtactgttgactcgtggtaacagtctgaatttacatctaaatgtccgacaaagccgtttactgccgacgctaaatgaagatagtgcgcttcgcagtagtatggcgcagttactgcacccgacgacgccagagaatgacgaagaagaacgtcagcgcattgttcaggtattgcgagaaaccaatggcattgttgccgggccccgtggcgcagcgacgcgattagggatgaagcgcaccacgctgctgagtcgaatgcagcggctggggatcagcgttcgcgaggtgttgtaatctgcttttgcaggagtatgcatgagaaacaaactctctttcgacttgcagttgagcgccagaaaagcggcaatcgctgaacggattgccgcccataaaattgcccgcagtaaagtgagcgtctttttaatggcgatgtccgctggcgtgtttatggcgatcggatttactttttacctttccgttatcgccgatgccccgtctagtcaggcattaacccatctggtgggcggcctttgctttacactcggctttattttgctggcggtttgcggcaccagcctgttcaccagcagcgtaatgacggtgatggcaaaaagtcggggcgtcattagttggcgaacttggctgattaacgcacttctggtggcctgcggtaatctggcaggtattgcctgtttcagtttgttaatctggttttccgggctggtgatgagtgaaaacgcgatgtggggagtcgcggttttacactgcgccgagggcaaaatgcatcatacatttactgaatctgtcagcctcggcattatgtgcaatctgatggtttgcctggcgctgtggatgagttattgcgggcgtagcttatgcgacaaaatcgtcgccatgattttgcccatcaccctgtttgtcgccagtggctttgagcactgtatcgccaatttgtttgtgattccgttcgccattgccattcgccatttcgcccctccccccttctggcagctggcgcacagtagcgcagacaattttccggcactgacggtcagccattttattaccgccaatctgctcccggtgatgctgggtaatattatcggcggtgcggtgctggtgagtatgtgttatcgggctatttatttacgtcaggaaccctgaaaaatcagcccggcgaaacagttcgtcgggctgaagattattcttgcgcgatttgcccatcgggccaggcatgaatcacggctttgatcagcgtcgccaacggaatggcgaagaatacgccccagaatccccacaaaccaccgaagatcaccacgcttaaaataatcaccagcggatgcaggttaaccgcttcggagaacaacaccggcactaacaggttgccgtccagcgcctgaataatcagatacaccgcgaagcagctccagaattcagtacctgcgccaaactggaatagcgccacgccaaccaccggaatggtcaccacaaatgcgccaatgtacggaataagaacgctgaagccgaccagcactgccagcagcaggctatagttcagcccgaagagcaagaaccccagccaggtggcgatccccaccacgatcatctccagcactttgccgcggatatagttggtgatttgttgattcatctccttccacacctgtcctgccagcccacggttacgcggcagcacccggcgaacggcgttcagcatctgctctttgtctttcagcaggaagaagaccatcaatggcaccagcaccagatagacggctatggtcagcaaaccgaccaggctggcgagggaaattttcaccacgctatcgcccatggtcagcatccgactgcgcatattttcggccattgcatcaataatgcccgcgtccattaacgccggatagcggcgcggcaacgtggcggcaaagtcagaaagcttattgagcatccccggcatatcgcggattaagtagatgccctgttgccaggcgataggcagtaccacgaacgccatcagtagcaatataccgacgaaaaccaccaatacaatgctcgtcgcccagcggcgggagcagccaatagattgcagacgcacggttggccattccagcaaataggccagcacaatagccaccagcaacggagcaagcaggccactaaagaaaaagataatgccaaatccggcaactaaaataaccagcaaggcaatcgcttccgggtcgctaaaacggcggcgataccattgcatcaacatttcgagcataaagaccttccctgaacctcaagagcgggattgcgatccgcaattgtatcgaaatgtcacaaaaaagacttcgctttttatgacggattcaggaaactgaaaagtcatttgagtgggctaatcttcgccgttacactcaaaggcggcgcggtgggaacgatatttcacagtatcggtcaaatgactatctccagaaatacaggatagaggttatgttcaggcagttgaaaaaaaacctggttgcaaccctcattgctgctatgaccattggtcaggtagccccggcgtttgccgacagcgcagacaccttgccggatatgggaacctccgcaggaagcacgctttccattggtcaggaaatgcagatgggcgactattatgtccgccagctacgcggcagcgcgccgttaattaatgacccgctgttaacgcaatatattaatagcctggggatgcgtctggttagccatgccaatagcgttaagacaccgtttcatttttttctgatcaacaacgacgaaattaacgcctttgctttctttggcggcaacgtggtgctgcactctgccctgttccgttattccgataacgaaagtcaactggctagtgttatggcgcacgaaatctcccacgtcacccaacgtcacctggcgcgagcgatggaagatcagcagcgcagcgcgccgctgacctgggtcggcgcgttaggttctattttactggcgatggccagtccgcaggcggggatggcggcgctgaccggtacactggcgggaacgcgtcaggggatgatcagtttcacccagcaaaatgaacaggaagcggaccgcattggtattcaggtgctgcaacgcagcggattcgatccgcaggcgatgccaaccttcctcgaaaaattactcgatcaggcgcgttactccagccgcccgccggaaattttattgactcacccgttgccggaaagtcgtctggcagatgcccgcaaccgtgctaatcagatgcgcccgatggtggtgcagagcagcgaagatttctatctggcgaaagcgcgcacactggggatgtataattccggacgtaaccagctcaccagtgatttgctggatgaatgggcgaaaggaaacgttcgtcagcaacgagcagcacaatatggtcgtgctttacaggcgatggaagccaataaatacgacgaggcgcgtaaaacgctgcaaccgttactggcggcagaacctggcaacgcatggtatctcgatctggctactgatatcgatcttgggcaaaacaaagccaatgaggcgatcaatcgtctgaaaaatgcccgcgatttacgcaccaatccggtgttgcagctcaacctggcgaacgcttatttgcaaggcggtcaaccacaagaagcggccaatattctgaatcgctacacctttaataataaagatgacagcaacggctgggatttgctggcacaggcggaagccgcgctaaataaccgcgatcaggagctggctgcgcgagcagaaggttatgcgctcgccggacgactcgatcaggccattagcctgttgagtagcgccagtagccaggtgaaattaggcagcctgcaacaagcgcgttacgatgcgcgcatcgaccagttgcgccagctgcaggaacgctttaagccttataccaagatgtaattcgcattaaaggaagaacaatgaccaaacaggtaaaaatctaccataacccacgctgtagtaagagccgggaaacgctgaacctgctgaaagaaaacggcgtggagccagaagtggtgctctaccttgagacacccgccgatgcggcaacgctgcgcgatttgctgaaaatactggggatgaatagcgcccgtgaattgatgcgccagaaagaggatctttataaagaactgaacctggctgacagtagccttagcgaagaggcgctgattcaggcaatggtggataatccgaagctgatggagcgcccgattgtggtcgcgaatggcaaagcgcggattggtcgtccaccggagcaggtactggaaatcgtgggttaagatgtgctccatcgctagttgaagcacattgccggatgcgacgcttgccacgtcttatccggcctacgaatactatggattaacttcgcgtagttcggataaggcgttcgcgccgcatccgacaataaacaccttatttacaacttcagaatttctttcacaaacggaatggtcagcttacgttgcgcggtaatgctcgcacgatccaactgatccaacgtcataaatagcgtgcgcatttctctgtcgagccgcttcagcaagaaacgccccacatcttccggcagttcaaaaccacgcaaacgcgcgcgtaactgtagcgcctgcaacttatcttcatcagaaagtggctgcaatttgtagatctgcccccagtcgagtcggctcgcgagatccggtaatcccagattcaactgccgcggtggacgatcgccggtgatcaacaaccgtgttttgccgctttccagaattcgattgtagagatcgaaaatcgccatctcccacaactcatcgcctgcaatacactcaatgttgtcgatacagaccaggctcaaatgctccataccgtcgagcacttccggaacaaaccaggtgcgtttatccagcgggacatagcccaccgcatcgccacgctggctcaattccgcgcaagccgcgtgcagcagatggctgcgccccgcgccttcgcgtgcccagagatagatgtaaccgctatgttcctgacgcagcacgttttgcagcgcggccagtaaagaggagttatcccccggccagaaacttgcaaaggtttcgtcgtcaggaagataaagtggcaaagagagctgtgccggtgtgttcagagatacctcaaccaggatttcacaaaatcggctgaagtttaccacagaatcccatgatgtttgaaccgggcagcaacactgcccggtcggtacattatttgtctgttatatccgcgtcttctgcgtccagcaccacttcttcagggcgcagcacactgatcagtttgaagatcaaacttaagccgataccgacgatggtcgccagcgccataccttttaactccgccgcgccgatgtttaccttcgcgccactgacgccgatgatcaaaatcacggaagtcaggatcaggttctgtgctttgttgtaatccactttgctttcgatcaaaacacgaataccggaagcaccgatgacaccataaagcagcaggctaacgccgcccatcaccggcaatgggatcatctggatagcggcagccagtttaccgacgcaggaaagcaggatagcgaaaatcgccgccccgccgataacccaggtactgtaaacacgggtgatcgccatcacgccaatgttttctccgtaagtagtatttggcgtagagccaaagaagccggaaatcacggtgctcaagccattagcaaacatgctacggtgcagacctggatcgcgcagcagatcttttttgacgatattagccgttactaccaggtgccctacgtgttcggcaataaccactaacgccgctggcagaatagtcagaatggcaaaccactcgaagcgcggcgtatagagggttggcagcgcaaaccagtgagcattaataatcggcgtggtatcgacaattcccattgcgaaagagagcgcgtaccccaccagcacgccaattaaaatcgggataattgccaggaaaccacgaaacagcacggaacctaaaaccgtgaccgccagggtggtaatagagatgatgatggttttggagtctggcgtttgcccttcagccgggagtaaacccgccataccggcagctacgcccgccagctccagaccgatgacggcaacgattgcgcccattgccgcaggtggaaacagcacgtccagccagccggtccccgctttcttcacgataaaagaaaccaggcagaacagcacgccgcacataataaagccgcccagcgcgacttcataccctaacggcaacagtaacaataccggactaataaaggcaaagctggaaccaagataagccggaattttccctttacagatgaagagatacagcagcgttccaataccgttaaataacagtacagtcgccgggttaatatgaaataagacgggcaccaggacggttgcaccaaacatggcgaacaaatgttgcaaactaagcgggattgtctgtaaaagtggcggtctttcactcaccccgatagcacggcgcgtcatagtattatcctctgtattatgtgttataggcgctttactcaaaaaaaagccgactcttaaagtcggctttaattatttttattctttatttcgtaccaaagattttgtcaccggcatcgccgaggcccggaataatgtatccgtgctcgttcagtccctgatcaatgcttgcggtatacagttcgacgtccgggtgcgctttttccagcgcagcgataccttctggcgcagctaccagcaccagaactttgatgctgctgcagcccgcttttttcagcaggtcgatggtcgcgataacggaaccaccggttgccagcattgggtcaacgatcagcgccatacgctcatcgatgttagaaaccagtttctggaagtacggtaccggctccagcgtttcttcattacggtacataccgacaacgctgatgcgcgcgctcggaacgttttccagcacaccgtccatcataccaagacccgcacgcagaattggcacaacggtaattttcttacctttgatctggtcgatttctaccgggccgttccagccttcgatagttactttttccgtttcgaggtcggcggtcgcttcgtaagtcagcaggctacccacttcggaagcgagttcgcgaaagcgcttggtgctgatatcttgctcacgcatcagtcccagcttgtgtttgacgagtgggtgtttgacttccacgatcttcatactctttctcctttgaggggcagccacaaaaaaaatcgacggattatacctcctttcttcaaggcggcaatattcttttcgttgactttagtcaaaatgataacggtttgagataaagttattttatattcagatggttatgaaagaagattattccatccgaaaactaacctttaccctggcacaagtcttctttcgccgcgcgcctggggaaaagacgtgcaaaaaggttgtgtaaagcagtctcgcaaacgtttgctttccctgttagaattgcgccgaattttatttttctaccgcaagtaacgcgtggggacccaagcagtgaccgataaaacctctcttagctacaaagatgccggtgttgatattgacgcgggtaatgctctggttggaagaatcaaaggcgtagtgaagaaaacgcgtcgtccggaagtgatgggcggtctgggcggcttcggtgcgctgtgtgcattgccgcaaaaatatcgtgaacccgtgctggtttctggcactgacggcgtaggtaccaagctgcgtctggcaatggacttaaaacgtcacgacaccattggtattgatctggtcgccatgtgcgttaatgacctggtggtgcaaggtgcagagccgctgtttttcctcgactattacgcaaccggaaaactggatgttgataccgctagtgcggtgatcagcggcattgcggaaggttgtctgcaaagtggctgtagtctggtgggtggcgaaacggcagaaatgccggggatgtatcacggtgaggattacgatgtcgcgggtttctgcgttggcgtggtagaaaaaagtgaaatcatcgacggctctaaagtcagcgacggcgatgtgctgattgcactcggttccagcggtccacacagcaacggctatagcctggtgcgcaaaattcttgaagtcagcggttgtgatccgcaaaccaccgaacttgatggtaagccattagccgatcatctgctggcaccgacccgcatttacgtgaagagtgtgctggagttgattgaaaaggtcgatgtgcatgccattgcgcacctgaccggcggcggcttctgggaaaacattccgcgcgtattgccagataatactcaggcagtgattgatgaatcttcctggcagtggccggaagtgttcaactggctgcaaacggcaggtaacgttgagcaccatgaaatgtatcgcaccttcaactgcggcgtcgggatgattattgccctgcctgctccggaagtggacaaagccctcgccctgctcaatgccaacggtgaaaacgcgtggaaaatcggtatcatcaaagcctctgattccgaacaacgcgtggttatcgaataatgaatattgtggtgcttatttccggcaacggaagtaatttacaggcaattattgacgcctgtaaaaccaacaaaattaaaggcaccgtacgggcagttttcagcaataaggccgacgcgttcggccttgaacgcgcccgccaggcgggtattgcaacgcatacgctcatcgccagcgcgtttgacagtcgtgaagcctatgaccgggagttgattcatgaaatcgacatgtacgcacccgatgtggtcgtgctggctggttttatgcgcattctcagcccggcgtttgtctcccactatgccgggcgtttgctgaacattcacccttctctgctgccgaaatatcccggattacacacccatcgtcaggcgctggaaaatggcgatgaagagcacggtacaagcgtgcatttcgtcaccgatgaactggacggtggcccggttattttacaggcgaaagtcccggtatttgctggtgatagcgaagatgacatcaccgcccgcgtgcaaacccaggaacacgccatttatccactggtgattagctggtttgccgatggtcgtctgaaaatgcacgaaaacgccgcgtggctggatggtcaacgtctgccgccgcagggctacgctgccgacgagtaatacccccgtaattaaagcgccagctctgccgctggcgtttttcaattcacctgtaaatcgcaagctccagcagtttttttcccccttttctggcatagttggacatctgccaatattgctcgccataatatccaggcagtgtcccgtgaataaaacggagtaaaagtggtaatgggtcaggaaaagctatacatcgaaaaagagctcagttggttaagcttcaatgaacgcgtgcttcaggaagcggcggacaaatctaacccgctgattgaaaggatgcgtttcctggggatctattccaataaccttgatgagttctataaagtccgcttcgctgaactgaagcgacgcatcattattagcgaagaacaaggctccaactctcattcccgccatttactgggcaaaattcagtcccgggtgctgaaagccgatcaggaattcgacggcctctacaacgagctattgctggagatggcgcgcaaccagatcttcctgattaatgaacgccagctctccgtcaatcaacaaaactggctgcgtcattattttaagcagtatctgcgtcagcacattacgccgattttaatcaatcctgacactgacttagtgcagttcctgaaagatgattacacctatctggcggtggaaattatccgtggcgataccatccgttacgcgctgctggagatcccaagtgataaagtgccgcgctttgtgaatttaccgccagaagcgccgcgtcgacgcaagccgatgattcttctggataacattctgcgttactgccttgatgatattttcaaaggcttctttgattatgacgcgctgaatgcctatagtatgaagatgacccgcgatgccgaatacgatttagtgcatgagatggaagccagcctgatggagttgatgtcttccagtctcaagcagcgtttaactgctgagccggtgcgttttgtttatcagcgcgatatgcccaatgcgctggttgaagtgttacgcgaaaaactgactatttcccgctacgactccatcgtccccggcggtcgttatcataattttaaagactttattaatttccccaatgtcggcaaagccaatctggtgaacaaaccactgccgcgtttacgccatatttggtttgataaagcccagttccgcaatggttttgatgccattcgcgaacgcgatgtgttgctctattatccttatcacacctttgagcatgtgctggaactgctgcgtcaggctagcttcgacccgagcgtactggcgattaaaattaacatttaccgcgtggcgaaagatagtcgcatcatcgacagcatgatccacgccgcacataacggtaagaaagtcaccgtggtggttgagttacaggcgcgtttcgacgaagaagccaacattcactgggcgaagcgcctgaccgaagcaggcgtgcacgttatcttctctgcgccggggctgaaaattcacgccaaactgttcctgattagtcgtaaagaaaacggtgaagtggtgcgttatgcacacatcgggaccgggaactttaacgaaaaaaccgcgcgtctttatactgactatagcttgctgaccgccgatgcgcgcatcaccaacgaagtacggcgggtatttaactttattgaaaacccataccgtccggtgacatttgattatttaatggtaagcccgcaaaactcccgccgcctattgtatgaaatggtggaccgcgagatcgccaacgcgcagcaagggctgcccagtggtatcaccctgaagctaaataaccttgtcgataaaggcctggttgatcgtctgtatgcggcctccagctccggcgtaccggttaatctgctggttcgcggaatgtgtagcctgatccccaatctggaaggcattagcgacaacattcgtgccatcagtattgttgaccgttaccttgaacatgaccgggtttatatttttgaaaatggcggcgataaaaaggtctacctttcttccgccgactggatgacgcgcaatattgattatcgtattgaagtggcgacgccgctgctcgatccgcgcctgaagcagcgggtactggacatcatcgacatattgttcagcgatacggtcaaagcacgttatatcgataaagaactcagtaatcgctacgttccccgcggcaatcgccgcaaagtacgggcgcagttggcgatttatgactacatcaaaagtctcgaacaacctgaataaccctatgccaatacacgataaatcccctcgtccgcaggagtttgctgcggtcgatcttggtagtaacagttttcacatggtcatagcccgtgtggtagatggtgccatgcagattattggccgcctgaaacagcgggtgcatctggcggacggcctggggccagataatatgttgagtgaagaggcaatgacgcgcggtttaaactgtctgagcctgtttgccgaacggctacaagggttttctcctgccagcgtctgtatagttggtacccatacgctgcgtcaggcgctgaacgccactgactttctgaaacgcgcggaaaaggtcattccctacccgattgaaattatttccggtaatgaagaagcccgtctgatttttatgggcgtggaacatacccaaccggaaaaaggtcgcaaactggttattgatattggcggcggatctacggaactggtgattggtgaaaatttcgaacctattctcgttgaaagccgccggatgggttgtgtcagctttgcccagctttattttcctggcggggtcatcaataaagagaattttcagcgcgctcgcatggcggcagcacaaaaactggaaactttaacctggcaattccgtattcagggctggaacgttgcaatgggcgcttccggtaccataaaagccgcccatgaagtgttaatggaaatgggcgagaaagacgggataattaccccggaacgtctggaaaaactggtaaaagaagttttacgtcaccgtaatttcgcaagcctgagtttaccgggtctttccgaagagcggaaaacagtcttcgttccgggactggcgattttatgcggtgtgtttgatgctttagccatccgtgaactgcgcctttctgacggggcgttacgcgaaggcgtactgtatgaaatggaaggacgtttccgtcatcaggatgtgcgtagtcgcaccgccagcagcctcgccaaccagtatcacatcgacagcgaacaggcccgacgggtgctggataccactatgcaaatgtacgaacagtggcgggaacagcaaccgaagctggcgcatccgcaactggaggcgctactgcgatgggccgccatgctgcatgaggtcgggttgaatatcaaccacagcggtttgcatcgccactccgcttatattctgcaaaacagtgacttgccgggttttaatcaggaacagcagctgatgatggcgacactggtgcgctatcaccgtaaagcgattaagctcgacgatctaccgcgctttaccttgtttaagaagaaacagttcctgccactgatacagctattgcgccttggcgtattactcaacaatcaacgtcaggcaaccaccacaccgccaacattgacgctgattactgatgacagtcactggacactgcgtttcccgcatgactggtttagtcagaatgcgctggtactgcttgatctggaaaaggagcaagaatactgggaaggcgtggctggctggcggttgaaaattgaagaagaaagtacaccagaaatcgccgcttaatactttgcgggccgacgagaaatgtcggcccgcattattcaggcactttcgcgaatgggttcgatttcattcagcgtatcaattaacggctgcggcttaccaataagataaccctgcatataatcgatccccaaagagagcaccgcctcgcggatctcttcgttttcaacgtactctgccactaccagcattttcttcattcgcgccaggtggcaaatgcttgccactatctgataatccagactattactcacaatattgcggataaaactgccgtcaattttaagcagatcggcattcacatttttaagccgcgcatagctggcgtagccggtgccgaaatcatcaatcgcaatctggcagcctaattcctgaagatgctgcaaggtgatttgcgcctgcttaacattggtcagagcattactttcggtgacttcaaaaataagttgccacgcttcaatctgatatttagccagcaactgactgacttcaacaggaaaacgagcctgacatacgctggttggagacagattaatagcaaaacggtgagcgggcatcttcgctctgttttcagccataaattgcagcgtatgctcaatgacccacatgtcgatactgctgcttaaaccaaattcgtgcgcgaccggcaagaagctatcggggctgatcagttcatcattctcacctttcatgcgcagaagaatttcatggtaaacatcaccacgcataccggtaatcggctgggccatcaggaaaaaatggttgtgttccagcgcctgctgtagtcgattcatcatcgcgactttatctttcaattcgcgttgcaaatacattgccccgcgacgctgcatattttccggggcgttggtcacgatggaaagttcggcgaccgtatttagctctcccagcagcaggtagatatgattcactgggctgcgcacatagcagtaactgacgccaatctgcggttgcatcggcatgccatcccaaaagaaacgaaattgcttgagatggctatccagtgcggtaatgcgctcctggtggctttctgtattcagtcgcagcgcgagatcgttaccgctaagctgataaacatcttcacccggttccagcaagggactcagccagtgagaaagtttttgcttgtattgaatccgcagcatgatgccatagttcttaaccagcatttccatgccagggatgcgtaaataacaaagcgcagaccagggggcatcacgcaacgcgcgattcagggcgcgaacatttggcagatgaaccaccgggtccacatacgcaagccgctgaatgcgtctgactaccgctctctgacgggttgccagtacagccatataattgacaataaaagagaataccagataactggaggaggttatggtcagctgcgtggtatagccaggataaatgggaatgtaattttgatagctgtggatgctgatcatcaacacgaccgcccagagcaggctaatcagcttataaccatagcgcatcgctccccacatcatcaggggcagcaataaactcaaggtataattggtgctaaaaattgtgcttttttcatttaacggcatgcataacagcaacaataaagcacctaatgccagtagccagagcgcgaactcttttttggtgactttggcatcaacctgctgttttaattggctataatagctacgtaaataaaatggatttcgcactacccgaatgatgaagtagcacagcgggacaccgatcagattacccaccagtaaggcctgataattgattaaagtcccgaggttaaaaggcatgacaccgaccagattttctctgctcgccagtaatcctacaaatgcagcaaactggaaaagtatcagaaacagcgttgcaggaaacacaatctgccagaatatacgctgggaaattaaacgggtatcaccatgactaacgttgttacgccggggagtaaagaccctgtaaccgccccaacagagaatgataatgataataaaattagccgttaaacttagcgtttcgtaaaaacccagctctgcatatttgcggacaaaaatccctaaggcgatccctggcaatgccgcccagctgaaaaacatcatcatgctgatcatcagtgccagaggcagataaaagagaaaaacctcaccggaagaaatatgcgcgaaagtattaatgtgggcgaaaatgggcaagattaaagaaggcaggaacagcggaagcccccaccatttatcacgtatttttatataagttgcattcagtttcatagatgctcagcagaatcccccacatcctgaaggaggtgtattcagacaggcatcccacctgacttcgaatgatgattattcatcactatagagagcattgattctaagtgtcatatgaaagtaccaattgatatatatcaaacaaaataaccctgattaatgaattattacgtttatcatgttaattcatcattattacatcatcattgtaaataattaaattaacttccataacattaaaatatgtatccactgacgcttttttacataacgaagaattgaccattttgtcctgttgtgccttaatgtaagtaccgtccacagcgtgggacatacttcaaggaaccttttgtgagtcaggcaaccagtatgcgaaaacgacaccgatttaacagtcgcatgacccgtatcgtactgctcatcagctttatcttcttctttggccgttttatctacagctccgtcggtgcctggcagcaccatcagagcaaaaaagaagctcagcaatccacactctccgtcgaaagtccggtacaacgttaacggttaccttctccactttcacagaacataacggcacttcgctgtcggatgcttttgctgtttgggattatcaaagcggcagatattctttcatcttaaattttacgtctttatcctgactgatgtttatcctgtttggctgcgaaataaatataaaattaatatatatgttgtaatgatatatttttataaattattccctgcgtgaattttaataaatttaatctatccctttatacgcaatacatttactttcctcttttgatgatcttaaatgtcttatttttcgtaatgtgtataacaaggaatagtgatgaaatttaaaaaatgtcttctgcctgtggcaatgttagcgagtttcactctggcaggatgccagagtaatgctgacgatcatgctgccgatgtttatcaaaccgatcaactgaataccaaacaagaaactaaaaccgttaatattatttccattcttcccgcaaaagttgccgtagacaactcccaaaataaacggaacgcacaagccttcggcgcgcttattggcgcagtcgctggcggtgttatcggccacaacgtcgggtctggcagcaattccggaacgacggcaggtgcagttggcggcggagctgtaggcgcggcagcgggttctatggtgaatgataaaaccttagtggaaggtgtttctttaacctataaggaaggcaccaaagtgtatacctctacccaggtgggtaaagagtgccagtttacgacaggtttagccgttgttattaccacgacgtataacgaaacgcgtattcagccaaataccaaatgtcctgaaaagagctaataatcaggaggagtcatgaagaaagtttttctttgcgccatcttagcctccttaagctatccggctatcgccagtagtttgcaggatcaactctctgctgtcgcagaagcggaacagcaaggtaaaaatgaagagcaaaggcagcatgacgaatgggtcgcggagcgcaacagggaaatccagcaagagaagcaacgtcgcgcaaatgcccaggccgccgctaacaaaagagcggcaacggcagcggcaaataagaaagctcgtcaggataaactggacgccgaagcctctgcggacaaaaaacgcgatcaaagttatgaagatgagctacgcagcttagagattcagaaacaaaaactggcgctggcgaaagaagaagcccgcgttaagcgagaaaacgaatttatcgatcaggaactgaagcacaaagctgcgcaaaccgatgtggtgcaatctgaagctgacgccaacagaaatatgactgaaggcggtcgcgatctgatgaaaagcgtgggcaaagcagaagagaacaaaagcgacagctggtttaattaatcgatgttagtaacttcaatcctataattcttgaagataaaaaaccctctgtagtaacagagggttttgttcattcatagtgcagggtcaaatcattcccactcaatggtagctggcggcttgccgctgatgtcatacaccacgcgggaaataccgttcacttcattgataatgcggttggaaacgcgaccgaggaaatcgtacggcagatgcgcccagtgtgcggtcataaagtcgatggtttcgacagcacgcagagagacaacccagtcatacttacgaccatcgcccattacgccaacggaacgtaccggcaggaacacagtgaacgcctggctgactttgtcgtacaggtccgctttacgcagttcttcaatgaagatggcgtcagcacggcgcagcaggtcacagtactctttcttcacttcacccagaacacgaacgccaaggcctggtcccgggaacgggtgacggtacagcatgtcgtacggcaggcccagctccagaccaatcttacgcacttcgtctttgaacagctctttcagcggttcaaccaggcccatcttcatctctttcggcaggccgcccacgttgtggtgagatttgatgacgtgtgctttaccggttgcagacgccgcagattcgataacgtcagggtagatggtgccctgcgccagccacttcacgtcttccagtttcagcgcttcttcatcgaatacttcaacgaaaacgcgaccgatgattttacgttttgcttccggatcgttttcgccagccagcgcactcaggaagcgatcttctgccggtacgtgaacaatgttaagaccaaagtgatcgccaaacatatccagaacctgctctgcttcgttgaggcgcagcaggccgttgtcgacgaatacgcaagtcaggtttttaccgatagcgcggtgcagcagcattgcggttacggaggaatccacaccaccagagaggccgaggatgactttatcgtcgcctacctgctcgcggatgcgagctacagcatcgtcgataattttcgctggcgtccacagggcttcacactggcagatatcacgcacaaaacgctccagcatgcgcataccctggcgggtatgagtcacttccgggtggaactgtacgccatagaagcgtttttcttcgttagccataatggcaaacgggcagctttcggtgctggctacggtgatgaagtcggacggaatagcggtaactttatcgccgtggctcatccagacatcgagcagcggtttaccgtctgcggtcagcgcatcttcgataccgcgaaccagtgcgctgtcgtttacgacttcaacctgcgcgtagccaaattcacgttcgttagaggcttcaacgtgaccgcccaactgcattgccatggtctgcatgccatagcaaacgccgaataccggtacgcctgcttcaaagacatactgcggcgcacgcggactgttttcttcagtagtactttccgggccgccggaaagaataatgccgcttggattgaagtcacgaatttgtgcttctgtcacatcccacgcccacagttcgcagtaaacacccagctcacgcacgcggcgcgcaaccagttgagtgtactgagaaccgaagtccagaatgaggatgcgatgcttatgaatgttttccgtcattgacgcttattccgaggcaagtgaaacagataatataaatcgcccgacatgaagtcgggcgaagagaatcaggagcccagacggtagttcggggactctttagtaatggtcacgtcgtgaacgtggctttcctgaatgcccgcaccgctgatacgtacaaactccgctttagtacgcagttcgtcgatagtaccacagccggtcagacccatacaggagcgcaggccgcccatctgctggtgaatgatctctttcaggcgacctttataggctacgcgaccttcgataccttccggcaccagtttgtcggcagcgttatcgctctggaaataacggtcagaggaacctttggacatcgcgcccagggaacccataccacggtaagatttgtaagaacggccctggtagagttcgatttcacccggagattcttcagtacccgccagcatggaacctaccatcaccgcgcttgcgccagcggcgatagctttggcgatgtcgccggagaagcgaataccgccatcagcgataaccggaataccggtgccttccagggcttctactgcgtcagcaacagcggtaatctgcggaacaccgacgccagtcacgatacgagttgtacagatagagccagggccaatgccgactttaaccgcactgcaaccagcttctgccagagcgcgtgcacctgcagctgttgccacgttgccgccgataatttgcagatccggatatttagcacgggtttcacggatacgttgcagtacaccttcactgtgaccgtgggaggagtcgatcagcagaacgtcaacgcctgcggcaaccagcgcgtcaacacgctcttcgttacccgcacctgcgccaaccgctgcaccaacacgcagacggccttgctcgtctttacaggcgttcggtttacgttccgctttctggaagtctttcacggtgatcatgccgatcaggtggaattcgtcatcaaccaccagcgctttttcaacgcgtttttcgtgcatttttgccagcaccacttcacgggcttcaccttcacgcacggtgaccagacgctctttcggcgtcatgtaaacgctaaccggctggttcaggtcggtaacaaaacgcacgtcacgaccggtgataatacccaccagttcgttttcttcggtaacgaccggatagcccgcaaaaccgttacgctcggtcagttctttcacttcgcgcagcgtcgtggttggcagaacagtctgcggatcagtcaccacaccagattcgtgttttttcacacggcgaacttcttctgcctggcgttcaatggacatgtttttgtggataaagccgataccgccttcctgagccagagcaatagccaggcgcgcttccgttacggtatccattgctgcggaaagcatagggatattcagacgaatagttttcgtcagctgggtgctgaggtcagcagtattcggcagaacggtagagtgagcaggaacgaggagaacgtcgtcaaacgtcagagcttctttagcgatacgtagcatgggcaatatctcgaccagagtggttaataaatattgccgcggcattatacagagcgtaaccgattgcatctacccctttttgcaaaaaatgcttgctatccccgaagggcgggttactatcgactgaataacctgctgatttagaatttgatctcgctcacatgttaccttctcaatcccctgcaatttttaccgttagtcgcctgaatcaaacggttcgtctgctgcttgagcatgagatgggacaggtttggatcagcggcgaaatttctaatttcacgcaaccagcttccggtcactggtactttacactcaaagacgacaccgcccaggtacgctgcgcgatgttccgcaacagcaaccgccgggtgaccttccgcccacagcatgggcaacaagttttagttcgcgccaatattacgctctacgagccgcgcggcgactaccagataatcgttgagagtatgcagccggccggtgaagggctgctgcaacagaagtacgaacagctcaaagcgaagttgcaggctgaaggtttgttcgatcagcaatacaaaaaaccacttccctcccctgcgcattgcgttggtgtgatcaccagtaaaaccggtgctgcgctacatgatattttgcatgtgttaaaacgtcgcgatccttctctgccggtgatcatctaccctgccgccgttcagggcgatgacgcgccggggcaaattgttcgcgccattgaactggcgaatcagcgcaatgagtgcgacgtattgatcgtcgggcgcggcggcggtagcctggaagatttatggagttttaacgacgaacgcgtagcgcgggcgatttttaccagccgcattccggttgtcagcgccgtcgggcatgagacggatgtgaccattgccgattttgttgccgatctgcgtgcgccaacgccgtctgccgccgctgaagtagtgagccgtaatcagcaagagttactgcgccaggtgcaaagcacccgtcaacggctggagatggcgatggattattatctcgccaaccgcacacgtcgctttacgcaaattcatcaccgattacagcaacagcatccgcagctccggctggcacgccagcaaaccatgcttgagcgcctgcaaaagcgaatgagctttgcgctggaaaatcaacttaagcgtaccgggcaacagcagcagcggttaacacagcggctgaatcagcaaaatccacagccgaagattcatcgcgcgcaaacgcgcattcagcaactggaatatcgtttagcagaaaccctgcgcgcacagcttagcgccacgcgtgaacgtttcggtaatgcagtaacgcacctcgaagccgtaagcccactgagtacgctggcgcgtggatacagcgttactactgctactgacggcaatgtactgaaaaaagtgaagcaagttaaagcgggtgaaatgctaaccacacgtctggaagacggctggatagaaagtgaagtaaaaaacatccagccagtaaaaaaaagccgtaaaaaggtgcattaagccagcacgaattcaacgcgttttttgcttatcaagccatgcccgtgctgacagaagtaatctactgcaccacaggcttttaacacctgcaacggttgatggcagtctggacaaagagctttcatttcaataaattccccgcaggatcggcaacgcgcatggccgttatcctgatcaagcacatgctgacattgtggacaatgcagttccatatgaattcctccggtagccattccctctacattcatagagggaatggcagataaaatacttacggataattatttatttttcttgatgtgcttcatcagacgcttacgtttacgcatctgggttggcgtcagggtgttacgcttattcgcatacgggttttccccttctttgaactgaatacgaatcgggcttcccattacgtccaggcttttgcggaagtagttcatcaagtagcgcttgtaggaatcaggcaggtctttcacctgattaccgtgaatcaccacaatcggcgggttataaccaccggcgtgggcatatttcagcttcacacgacgaccgcgtaccagcggcggttggtgatcttcaacagccatcgtcatgatgcgcgtcagcatagaggtccccacacgacgggtggagctgtcatacgcttcacgtacactttcaaacaagttaccaacaccactgccgtgcaaggcagagataaagtgcacacgagcaaaatcgataaagcccagacggaagtccagcgtttctttcacctgctctttcacttcctgactcaggccatcccacttattcaccacaatgacaagactgcgcccactattgagaataaagcccagcaggctgagatcctgatcggaaataccttcgcgcgcatcaatcactaacatcaccacgttggcgtcttcaatggcctgcaacgttttgattacggagaatttctctacagcatcggtgattttgccgcgtttacgtacgccagcggtgtcaatgagcacatactcacgtccatcgcgttccattgggatgtagatgctgtcacgcgtcgtgccaggcatgtcgtaaacaacaacgcgctcttcaccaagaatacggttagtgagtgtagacttacctacgttcggacgacccacaatcgccagtttgatcggcagactttgcgggtcgaagtcgtcttcctcttcttcttcgccgttctcttccgcttcaaattgcgcccagtattcagcgtcttcgtcgacttcctcttgcggtgcgagatcttccatccacggcagcagcacatgctccagcagacttaatacgccacgaccgtgagacgcggcgatcgggtagatttcacctaaaccaaggctgtagaaatcaaccactgcctgatcgggatccagaccgtcagttttgtttgccaccaggaaggtcggtttttcacgggagcgcagatgtttggcaatcgcttcatctgccggcatcaggcccgcgcgcgcatccaccataaacagtacgacgtccgcttcttcaatcgccagcaggctttgttccgccatgcgggtttctacaccgtcttctgtgccatcaatcccgccggtatcaatacagataaactcacggccttcaatttccgcacgaccgtacttacggtcacgagtcagacccgggaaatccgcaaccagcgcatctcgggtgcgagttagacggttaaataacgtggattttcctacgttagggcgcccgacaagcgcgaccacaggtaccatgtttaaagcctcatttttataaatcatcagacaacgcacgctatattcgcgtcgttgttaaaaacaggaaaacggcccctgtccaggagccgttttcaaagtgaacgacagagacgattaacgtgtaatagagtacacggttccgtcttttgcctggatcagcagtttgccgtcagcggcaaccggttcagtctggaaaccggaactatcaactttttgctgggcaacgaaacgaccatcttcgacgttaatccagtgcagataaccttcactgtcaccgaccaccaggttgccattatacagcaccggagaagtcagcaggcgatgcagcagatcgctttgtgtccacagcgtaacgccgccatcaatggtcaacgccatcacccggtcattttgatcgaccagatagatgcgattgccgtcgacgatgaaatcattcacgctacccagttcgcgtttccacataatctgaccactgcgcagatcaagcgccgtcaggttaccattataggccagcgcgaaaacaacgccgttaacaacgacgggagtcgtgtcaacatcgctcagacggtcaatttcggtagaaccggtcgcctgggaaatacgctgctgccaaatcatctggccctgttccatcagcactgcgctgacgcgaccattatcgccccccacgacggccgcaccaaaagccgttgtcggcgcagactcgccacgcaaagagaggctaggcatatcgaggttaactgtccatttgacagcgccgtcagcttcgttcagcgcttgtaactgaccgttactggtgtggattaacaccagaccgtcgctgaccaccgggcggctaagtgcttcacccgcgactttagtttgccatgccacagtaccatcgctggtattcagcgcgtaaacctgcgccttttcgctgccaatgtagacatgcccaccagacacggtcacaccgccagaaagtaatgcaggctctttagagaaccagccatctttctcggccaggctgacagaccagatttctttgccatcatccgcattcagcgcttttactaaaccagcgcggtccgctgcatagacaacgttgtccgccagtgccggatgaagattggaatagaagttgccaatgccgctaccaacggaagtgctccacgccgtggtcggcgtaaactggttttcaacggttggcaatggggacatctttaccacatcttcttcgctgttaaacaggctacagccgcttaaaagggtaacggaaagcagtcctggcagcagtaatttacgcaattgcatcgggtccctctcagatggacaaattattaattttcatctgcatcatttcgctcagtgccggagtaacatcgcttttcacgcctgcttcccatgcactacgcgcaccttgcttatcacctttgctcagcaatgcttcaccacgcaggtcggcaacaatggcagcccacccttcacctttgatggtatcaagggttttcagcgcggcatcagcctgcttgagctgtacctgaacgcgagcaagacgcagatttatcacggctttgagattttcatcgctcgtgtctgccagcccctgttgtaactgggcggcagctttctctagttcatttttgtcaacaaattgctgcgcaagttccaaagaagccagcgcaccataagtatttttattttcagcagcaaatttttccgccgccgggatgctatccggtttgccttcgctcactgcggtaaccgcattttgataggcaagagaagcggagcgtgcagaatcaacctgatggctgttccagtagcgccagccaatcagtgcgccaacgcccaaaatcaccccaacagccagtgctttgccattttcagcaaaaaagcgtttaaccgcttctacctggtcgttttcgttctcgtaaatttccacgctgtccttctccttccttaacccagtaacgtgcgcaaatgcgcggctacgctatcctgcgcaactgccgtttgctcaccagagcgcaaatccttcactactgctgtgccgttagccacttcagactcacccagcaccacagcaacgcgggcaccccatttatcagcacgggcaaactgtttcttaaagttgccgccgccgtggttggtcatcaatttcacgcccggtaattcatcacgcagacgctcagctaatgccatagccgcagattgtgtatcagcaccactagccaccaggtatatatcgacaacaggatcggctttaaattccggattaacggcctgtactaacaatacaagacgttcgaggcccatagcaaaaccgacagccggtgttgcacgaccgcccagttgttccacaagaccgtcataacgaccgcctgcacacacggtgccctgggagccgagactgttagtcacccactcgaaaacggtacggttgtagtaatccagaccacgcaccagacgctggtttacggtgtaagcgatccccgcgctctccagcagtttgcacagaccggcaaaatgctcacgagattcctcgtccagatagtcacctaatgccggagcgtcgttgagaagcgcctgcacttccggatttttactatccagcacgcgcagcgggttagtgtacatgcggcgtttgcagtcttcgtccagcttttctttatgctgctcaaggaatgccaccagcgcatcgcggtaattggcgcgtgcttccaggctaccgatagagttcagctcaagagttacgtgctcggaaatacccagcgcgcgccaccagcgggcagtgagcataatcagttcagcgtcgatatccggaccttgcagaccgaaaacttcgcagcccaactgatggaactgacgataacgccctttctgcggacgctcgtgacggaacatcggcccgatataccacagacgctgttcctgattgtacagaagaccatgctcgatgccggcgcgtacacagcccgccgtcccttcagggcgcagagtcaggctgtcgccattgcgatcctcaaaggtgtacatctctttttcaaccacgtcggtgacttcaccaatcgcacgtttgaatagcggggtctgctctacaatcggcaagcggatttcactgtaaccgtagctgccgagcacgtttttcagtgtgccttcaatgcgctgccagatggccgtttcgccaggcaggtaatcgttcatgccgcgaatggcttgaatgttttttgccacgtttattctctttctgaatataaaaatgaaccctcaacgcttccctcaatgtttcgggagccatgcgggttcaatcatacacgggaagcgaggcgcttcccatcacgttattatttttcaacctgctgaacgtcaattcgacgcgcttcgtccagctgactggctttcgcacgaatgcgtgcttccagctggtcgatcatatcgttgttgtccagacggtctttgcgcacgccatcttcatagaggccgcttttcttgttgccgccggtgacgccgagtgtagaaaccagcgcctcacctgggccattcaccacgcagccgataatgctaacgtccatcggagtgatgatatcttccaggcgttgctccagcgcgttaaccgtaccgataacatcaaattcctgacggctacaggtcgggcaggcgatgaagttgatccctcggctacggatacgcaggcttttcaaaatatcgaaaccgactttgatctcttcgaccggatcggccgccaggcttacgcgcagcgtgtcgccgatgccttcagacagcagcagacctaaaccaatggcggattttactgccccgctgcgcgcaccaccggcttcggtgatccccagatgcaacggctgatcgatctgttttgccagcaaacgataagactcaacagcgaggaagacgtcagacgctttcacgctgactttgaactgatcgaagttcaggcgatcgagatgatcaacatgacgcatggcagattccagcaacgcctgcggcgtcggttcgccatacttttcttgcagatctttttccaggcttccggcgttaacgccaatacggatcggaatgtttttatcgcgcgcacagtcaaccaccatgcgaatacgctcttcattaccgatattgccagggttaatacgcagacaatcgacgccgtattccgctactttcagcgcaatgcgatagtcgaagtggatgtcagccaccagcggcacgttaacctgctgtttgatgagtttgaacgcttctgccgcgtccatcgtcggtacggatacacggacgatatcagcgccaacgcgttccagcgccttgatttgattgaccgttgcttcgacgtctgtcgtacgcgtattggtcatggactgtacggcgatgggagcaccatcgccaatcggcacattcccaacgtaaatacgtgtactttttctacgttgaattggagcctggttatgcatgaaaaatctcccgcgttacccgtctgttactgcgccggactttgttcggcattgagggtcagacgcgcaacctggttagttctgataaaacgactcagatcgacaggtttcccttgatactggatctgtactgcggctggcgcaccaattttcagtttgtacggtgcctggccggttaagttcaaattaccgtctttacgctgcataccgctaaacaattttttaccggtagcatcagtgacctccagccagcaatcggcagtaaagttcatcaccagcgcattcggatcagccaccggcgtggtcacgccagcctgatcggttggcaacggcgcagcaccatctggcgttgttgctgccgttggtgccggggtcgcggcggtatcaacatttgcctggctagggctaacaaccgcattctgttgcggatcaacagctggtgctggcgcagttacggcaggtgtttgcgtgttggttgcggtagtatccacagacgctggcggcgtggacgttgtagccgggtctgtagttgtgctcgtatttaatggaacactctgcccctgctcgctattactgctcagttccgcgctagattgatcggccatagtggtgatctcttcctgctgagctttgcggtcttgccaccaccaggcaccgctcaggccgataaccacaaacaacaccagccaagtgaaggtcatcagccagccgtcgcgttttttgcggcgtttaccgagggaaaaactctgcatcggcgcaacttttgcagcccgaagtggagcctgcttttccagccctggcagcagttcttcttctggaatatgtaccagacgcgcataagagcggatatatccgcgcaggaatgtactagcaagatcggcgggtgccttatcttcttcaatgtcgcgtaccgtggaaaccttcaggcaaagtcgctcggcaacggcctgctgactaagtcctagttgttcgcgagcattacgcaggcgagcgccggtagtaagtgcttcattttggtcgtgcgtggcttcagtattcattcgctgcaggtacgtttaaatgagaattgagatgccggtgaaccatcatgctcacccacaccgcgaaacatccgttaagttaaccgttatcatacagtataagaccgtctgtgtgctcgtgacaaagcccacattcactaaggctaacttactgttgcatcgttacatactgccttaaagtcagcaaaaacgcaccgttaatattgaccagacaattgcaacttaatacttcattcataaaacattacgccacggtacataaagtaaccgtggcgtaatggctatcagaccgctttaatgtcgatggcttcaccctgcatccgtttacgcagggtacgtttcgtacggtcgataacatcgcccgccaactgaccacaggcagcatcgatatcatcaccacgagttttacgcacaatagtggtgaaaccgtagctcatcagcactttactgaaacggtcgatacggctgttgctgctgcgtccatacggcgcacccgggaacgggttccacgggatcaggttgatcttacacggcgtatctttcagcagttccgccagttggtgcgcgtgttcagtgccgtcgttaacgtggtcaagcatcacgtattcaatagtgactcggccctgattggcgttggatttctccagataacggcgcaccgcagcaaggaacgtttcgatattgtactttttgttgatcggcacaatttcgtcacgaatttcgtcgttcggcgcgtgcagggaaattgccagtgcaacgtcgatcatatcgcccagtttatccagcgccggaactacaccggaagtggaaagcgtgacgcgacgtttagacaggccaaaaccgaaatcatcaagcatgatttccatcgccggaacgacgttgttcaggttgagcagcggctcgcccatgcccatcatcactacgttagtgatcggacgctgaccggtgacttttgctgcgccgacgattttcgccgcacgccacacctggccgataatttcgctcacccgcaggttgcggttaaagccctgctgggcggtggaacagaatttacactccagcgcacaccccacctggctagagacgcagagcgtggcacggtcgtcttccgggatatacaccgtttcgacgcgctgatcgccaacggcgatcgcccatttaatggtgccgtcagaactacgctgttcttcaaccacttccggtgcgcggatttccgccacctctttcagtttgccgcgcaacactttgttgatgtcggtcatctcatcaaagttgtcgcagcaatagtgatacatccacttcatcacctgatcggcgcggaagggtttttcacctaaatctttaaaaaactcccgcatctgctgacggttgagatccagcaggttgatttttccatctttcgtggtgacgttttcaggtgtgactaattgttcagacatatgctattccggcctcgttattacacgttatggcccctggagggttgaaaaaagaaacgccccggtgagcggctgctcgtccgggggcgctgcattgtacaaattctggcgcacggatgccacgtttgcacgcggcatttacgaaattattaacgggtgcgcgggcacacttcgccttcgccaaagaaataagcgatttcgcgagcggcagattcgacggaatcagaaccgtgggtaccgttttcggtcaggctgtcagcgtaatcagcgcgcagagtaccagccagtgcgtttgccggattggtcgcgcccagcagatcgcggtgacgctgaacggcgttttcaccttccagcacggaaaccacgatcgggccagaggtcatgaattcaaccagaccatcaaagaacggttttccatcgtgttcagcataaaagccacgtgcctgttcaacggtcaggtgcagcattttggtgccaacaattttgaaccctgcagcttcaaagcgcgcaaagatattaccaatgacgttttttgctaccgcgttcggtttgatgatggaaaaagtacgttcaatagccatttttacctctgtaaattgttctgttgttgtctgtaccagcgtacgagatggcgcggattataatgagcaacagggccgttgactattgatgaaggtaacatttttttaaaataaaatgagttttagcaacaatcagggacaaaacagattattgcatgacaaatttcactgtcgcgatttgccccacgtcatccatcaccagcaattgataatcacctttatccgtcaaatgcagggtcacgttgcgcccgcgttcagttaacggttcgccattcagaaaccaccagcgttcacctgcccctccactactttgcaacggcaaagtcgcttccgctgcgcccggtaaacgtttaataatcgcgccatcgcgaacgcctgtcagctgcagcgggagctgggcatcgtgaccgtatggcgggcaacttgtgctggccggtggtaagcgcacagcgcgacgttcacttgcgggcagccagggttccagcggtagcggccagacatttatcatttcttgtcgcgcttgcgggcaatcagcggcaacacgtttgccattttcatccagccagatggggaaacgaatgccattaatgccttcctgctccggcagtaatagagttggcggctgactcccgtccagcagccaggttgccaggcggcggcgacagttaccgtcaccttccggcaaagactgtccgcccggccagcagataacgccacgagtgacactgttcgggcgcgggtcttccggcagattcgcactgcggctcagtaagatattattgacctgattcaacaatggtacggcactggcaaagccaaactgaccaacaacgggcgtgccgtccggtctgccagtccagatcccaatgacatagcgagcgttaaccccaatcgcccaggcgtcacgatagccatagctggtgcccgttttccatgccagtggggcgacgcgcggcaaggcactatccggcaagggttgcgcttcatcagccataatccggcgaatgatccacgccgccccgctgctcattaaaggccgttcaagcagcggatcgtcaggctgtaagcgcaatttgcctgccttgccgtggcgagcaaacgcggtatacgctgccgccatatcttccagttttgcaccagcgccgccgagaatgagactaagattcggcgcagcaccgttgggcaaatataacggcaatccaacattgcgtaactttgccgcaaaccgtttcggtccataggcttccagcacctgcacagcaggtaagttcaggctgcgcaccagcgcctcgctcatgctgatcgggccatgaaaaccgctatcaaagttacctggtcgataatcaccggtgcgccgggggacgtcttgcagcagacttgccgggtggatcaagccttcatccagcgccagaccataaacaaacggtttgagcacacttcctgggcttcggatgctattgaccatatcaacatgaccaaagcgactatcatcgttgagatcaacgcttcccacccagccgcgaacacgcatatcggtatgatcaaccacgatcatcgccagactgctgcgcggtggcaaccgccctttccagttttgcgccagttcttccagacgtcgttgaagaccggcatccaacgtagtagtgattttgtcgcttttgcttttaccgagcatcatgcggctaaacagcggtgccagttgcggcatttgtcggggggccagccagatgggttcttccctactctcttttacctgctcacgggaccacacaccttgcacggccatccgttcgagcactttattacgcgcggcttcggcacgctccggccaacgatccgggcgaagacggctgggcgcttgcggcaaaaccgccagcattgccgcctcggaatagcttaaattcgcagggctttttccgagataagcccaacttgccgcaccgatcccctgcaacgtaccgccaaacggagcgcggttaagatacaaggtcagaatttcacgcttagacagatgccattccagttgcaacgcgcgccagagctggcgaattttgccgccaaatgttttggggtgaggatcaagcagacgagcaacctgcatagtgagcgtgctgccaccggaaataacccgtccgctagtgagatcttgccatgctgcgcgcgccacgctgaatggattcacccccggatgcttccagaaccagcgatcttcataattgatcagcgcttcaaggtaacgtggagaaacatcttcgattgttaccggataacgccagatgccgtcagcatcggcgaagcgccagagcggcgtaccatcctgcgccacgaccactcgtgcgggattgacttcatgcagcggtagaggccagagtttatctgctccccacgctgcaagaaaaaggagaaagggcgcggctgccaacgttatccagcagccgcgtttggttaacaagcgaggcatttacggtctgacaatcagcagatcttcagccgcgccggtcgcccgccattggggaacatacatactttccaccatcggttgcggtacctgatacgttcccggcgtcaccgcccgcgccagatacaccagcgttaccggttggtattcatcaacggcaaccgccgccacaaagcgatcgtcacggaactcaatgtgcttaatgctcgcctgctgcatctggttcagtaagttctgcacttcgccaccactttgctccaggctggcgctaccgttcgccagattctggttttccagttccagacccgcaggcagcagatccacgactaacgcatccggcacgctgttactggcttttacctgcaaccacaccagcaccagatcgccgctacgtaagctgtccaggcttttgctcttaccatcagtaccaagaatatgacgctcgatttgcagcacattgttcgccggtaaaggtgcggattgcggataaccgctggcatccatacgcaaccataacggctgatcgccactgttgctcacctgcaaggtgacaagttgatcgctattcagattgctgttttgcgctttctcgcctgtcagctgctcagcactgaaagaggtttgcgcctgccatttaccgggtaaatcctgaatcgtacgggcagccaggaacaacgcgttactttcctgcgtgcttagccagcgttcaccaaacgcctgctggctaagtgtgttcagcaaagtgtactgctcatcgggtagcagtttattttcttccagcaaggagagcattaacgcgttgtcgcgcagactactaccgtaatcacccagccatatccgctcatcactattacgcggcgttttcagcgccagcgcaatcgcttcttcaccacgcgtcgcatcacccatggttttcagcgcaacgccaagttgcagcagcggtaaaccagaagcggcatctgcacgatgctcccagatttcacgcagcgcacccagcggagccttttgctgacgggccaacaccagcgcagcgtaagactgtacggcgaatttactggctttgagattatccgcgtacgggatgctcatcatgcccggatcttgtaaatagcgcagcagacgctcattaccccggttaatggcgtctgtcggcacgctgtaaccctgttcgcctgcgcggaccaggaaatccatcacgtaagccgtcagccagtactcttcgtcaccgtttttatcccacagcgcaaagccgccgttatcacgttgcatttgcagcaaacgggaaatgccgatatcgacgcttgcacggcgtttctcatcactgtcgcctttgatgcccaacgcctgcagttgggctgcgttggtataaagactcggaaacaggccgctggcggtttgctcaagacagccgtacggatacgcttttaactctttgatataacgtgcgatgttcagcggtggtttgccgctcaacaacaattgcccttccagcgtaacagggctgaagttttgcaatccatccgccggaatcgcccatgtctcaccaggctgtaacgccgtaccgtaattaaccgtttgtgccgggaacgccggacggacgccgattttccactgcttatgctgatcggcaacggtttcacccggtaacgctaacccgctaatggtggcctgaatttctccatcgccataacccggcaatgctcgcaccgggataaacagcgtagtacgcacacctggcgctaattcaacggctgcgggactatcgctgaccagttcaagcaaaccactggcggtcagggcaacgttcagtttttgcggtttatcggtaagattagtgatatccagcgtcagacggctggtatcgccactcgccataaagcgcggcatgttcagttcagcaatcaccggtgcggcaactatcactttactttcgttgctaccgaagtcatctgccgtccaggcttgcgccatgacgcgcaattcaccgttaaaatcgccaatcggcagtgtaacgctgccttcgccctgttcgttgagcgttaccggcagcgcctgctgcacgacaatattgacgtgattgaccggcggtttaccaccacgtttcagctcatcaccatcgccaccgaaacgcagagctgccagacgcccctgaccttcaataacctgaccgtaaatatcgtaaatgtctgcgccatagcgtttctgaccaaagaacgcctgccacggatctggcgtgacgtagtcagtaatattcagcacaccactatcaacggcagacaccagcacattcacctgtttaggcttctcgccatttttagtgctggctttaattttcacggttaatggttgattgggacgcatttttgctggtgtttccagcgccagatcgaggcgacggttttcatcgccaagcggcagatgcaacacaccaaccgcgcgttttggcgtcgcggagcgagatttatcgccaggacgtaccaccagcgtacttaaatacagatcatgacgattccaggttttatcgaccggaatcgtcagatccagcccttgagcccgaacatcaatctcttgccaccacagcggcccttcactggactcgaccatcgcataacctttacccgccgttggcgcggcgatatgcaacttaatggtgtcgccagggcgataactggctttatccagtttcagcgtgacacggtcgggtcgcactgcgccgctaccgtcgctgttgtcctgccagctatagccagcccagaaacgaacactactgaccgcttcattcggcgctttgacttccagacgataagcgccccactctaccggaaaactgaccttgccggtttcgtccgctttcagatccagagtttgttcattttcgatcagatctttttgatcaaactgactctgccagccttcatcttcactccagttccagtagtaatcgcggcgttcgcgaatcaggcgcacctgcaagccgctcacggcttttttcacgccttgcgcatcgctataaacgatgtcaaaagcggcgttactgccttcatcaacaatgggctgtttcaccgtgctgtcagtacgataatcgtaaacgcttttgctggcgaactgcggacggatccccggcaatgcatcggcaggccagatagcctgctcagcgcggcgcgtcaccgggcgaccgccgctttccagcaaactaccctggaaaataacctgtaatggggaatgcgtttccttccactggctttctgtagaaacttcgccgcgccctttatcatccagcgtcaactgaacttcatccagcgtgcgggaaagattttcggcagctatatcgccgaattcaaaaccaggtaaggcactcacagcttcacgcagtgggcgcaggaaaagttgcccttgcaaagtattaccattagcaggtgcaccatacaggtagtaccccaccacggagaatttcacttcatctttcggcgttagcggggttttctcaccggtcagattcagcgccatgcgctctggcataaaatcttcgacgtggaaatcccacatccgatactgattatcgcccgtgttagcgcgaatatgccacataccggttgccgcattgctatcgagtggccaggtaaagtggtagaggccattctccggctgactaacgacgctcctgagtacctgcccatcgggtttaatcacgtctaacttgatgggttgattgggcaacgctttaccgtctgcatcacgcagcaaaccattgaggattaccgtttcacctgggcgataaagatcgcgtgggccaaacatgaaaaactgtttgctatagcctggcgcgccagcaatgttaaattctgctaagtccagcgccggaagttttaaatcgagtagcgttgtctgaccgtctttacgcgccaacagtaatgccgcgtttttatcattttccagctgcacatgcccctgagcgtcactggttgcctgagtcagagtctgccctttctcatttaataaagagacttcaattccttgctgggccgcgccgttttccagactttgggtaaagatatccagacgattgtgataacggtgagcactaacgccgatatcacttaacgtaaacagcgtcgcgggattactgtaatcgtaacgtccagcctgattcatcacagccagatacacgcccgcctgctgaagcggtttgatatcgcccagcggcagcaataatttttcacgggtgttacgcgcaggattgagatcaaaccgtccggtgtagaccagatccgccatctgcagcagtttgtcactctgccagttcgccaggctattgcggtattcccattggctaatgaatgctggcagagattctggcttaacgcggaagaagttaacatcgacattattaacgttgagcgccattaccggcagcccttcaacgactttgccaggcagcaggctaccacggctggcaaaaccgacgctgggttggatgtcgcgggtagttatagttttttcgtaatctttactgaaggttgcgttgttgagtgctttgacctccttgccaatagtaacgatcaaatcacgtttcggttcgaggtggcgtaaacgtaactctttaagattatcactcagctcccaggcaccatccactttgccgctttttttatcgacgacatgaataacgcgactgaaatcctgatccgggtcgagagggatggagaacgtcagcaccagcgtggctgcaccatcaagttggacttcagagagatccagcaatgtcagcaccttaccggcactctgttgggccagtttttgtctctccggcacggagagttttgcactactcgcgttttcactagaggccgctttagtaacttcagaaggcgcatcttttttcaccgctgttggcgcgttatcgttgttgtcgcaccctgccagcgccagcattagcatgcaggcggctacgcgtaactttttcatttttcatccctgccacaatggcccgttagcaacgtcgaataattattatgcgtgagaatttacgttatgtaattcagtatcacgcccatacaatccgaattttagtgagaattgtggctcagacagccaaatcagcctcttttgcttgtcgcttttcactaaacatccgacaatttagcctaaccccggcaaaaatggagatgcctatgtccacgacatggtttgtaggagccgactggctcgccgaacatattgatgacccggaaattcagattatcgatgcccgcatggcgagccctggacaggaggatcgtaacgttgctcaggagtatctgaatggacatattcccggcgcagtgttttttgatatcgaagcgctttctgatcacacttccccgcttccgcacatgctgccgcgcccggaaacgttcgccgtggcgatgcgtgaattaggcgttaaccaggataagcacctgattgtctatgacgaaggtaatcttttcagtgccccacgagcatggtggatgctgcgcacctttggtgtagagaaagtgagcattctggggggtggacttgcaggctggcagcgcgatgatctgctgttagaagaaggtgcagtagagctgccggaaggagagtttaacgccgcgtttaatcctgaagccgtggtgaaagtaaccgatgtattattggcaagccatgaaaatacggcgcaaattattgatgcccgcccggctgcacgttttaacgcagaagttgatgaacctcgcccaggtttacgtcgcggacatattcccggagcactgaatgttccgtggacggaactggtgcgcgaaggcgaactaaaaacgaccgatgaactggatgcgatattttttggtcgcggcgtcagctacgacaaaccaattatcgtcagctgcggctctggtgtaacggcagccgtggttttgttagcactcgcgacgctggatgtgccaaacgtgaaactgtacgacggcgcatggagtgaatggggcgcgcgggcagatttaccggttgagccagtgaaataagtattttacaggcaataaaaaaccgccgaatttggcggttttttattgctagtctggttcgcggcctttccagcaggttgacttgtgttacatgagcaacgcaggtgcttcacagcaaaacaatactcaccagtaactctctttttgtcaagcaaaagagagtaattattgtttatttagcgtattatcgacaccggccctttccgccgtgttcggtaataaaataacctggcttattagtccgaattcagacaaatataaataaatcctgctcaaaattaaaaattctaaccggtaaaagatattacttaaacatgtaaattcactttcctttaaaaaacaaaaaaccgccaaaatcaggcggttttttgttgctggtccggttcgcggcctttccagcaggttgtattaccgtagtaatgcaagcgcgtctcagcggagacaatactcgccagtaactctctttttgtcaagcaaaagagagttattattgttctgttagtgtattatccactgcggccctttccgccgtctcgcaaacgggcgctggctttaggaaaggatgttccgtggccgtaaatgcaggtgtttcacagcgcttgctatcgcggcaatatcgccagtggtgctgtcgtgatgcggtcttcgcatggaccgcacaatgaagatacggtgcttttgtatcgtacttattgtttctggtgcgctgttaaccgaggtaaataataaccggagtctctccggcgacaatttactggtggttaacaaccttcagagcagcaagtaagcccgaatgccgccctttgggcggcatattttagattatccgattctgtttaaagtcacgcaaaaaaccaccccagcgacgttcatagaatggcgcaatatgttcggtaataaagtggctaattcctttttccccttttttcacctgacaaatatcgattggttcatcgccaggtaatgtatcggtcgctacacttcccgtcgcctgaataatttcttcgatatcaccatcggcttcaatgccaataagtaaattaggctgtgcctcttcgttctctttaatactacaaataaaagcacgcttcaccggcttaatggttttaaataaggtggtgagactatcaatcatttgtgctggcggctctgcgacttcgcttaatatcaggctttcaccgccttccaggatttcctggctgctcagcggatttccctcttcaccaatcaacaaactgatttcacgcggcataaattctttaccggttggcagtttggcattaaggaagagcgtttcgccaagtgtcatctcaaacagcgtgcgaacgggcattacgacaaatgcctgttcgtcttcaaccgcctgttgaagtgcttctaagctggtgaaaaaaggaatgacgctggtgccgtcttctttttcccagtgctgtaaatcaagcgcgctatcttcaaccacagcctcgccctgcgccgccgtaccaggcacccagacggtggattccagtagagtacggaaaaaggccgggcggtgcgccggttcagttgctgctttttccagcaggtcttcaagttcgttttttgtttcggacataagaaccacaattcattcaacgttcggggcgcaaatgcctgatgcgctacgcttatcaggcctacaagggattcgcaatttgttgaatttgcagaatttgtaggccggataaggcgtttacgccgcatccggcatattagtttacgccgttaacagattagctatcgtgcgcacaccaagtcccgtagcgcccgcagaccactgttcaaccggcgctttacggtaagtcgcgctgcagtcgatatgcagccagccttgctgatagttctcaacaaagtggctcaggaagcccgccgccgtgctcgcgcctgccggatacgccgcgcttccggtattgttcagttcggcaaagttagacggcagctggctgcggtggaactccgccagcggcagacgccagaacggttcgttctcctgcgcggcactcgccagcaagcgaccggccagcgcatcgtcaaaactgaacagcgcgtgataatcattacccagcgcagttttcgccgccccggtgagggtcgccgcatcaatgatcatttccggtttctgcgcactggcatcaatcagaccatcggcaagcaccagacgcccttcggcatcagtgttcatcacttcaacttttttaccgttgcgataggtgatgatatcgcccagcttgaacgcattgccgctaatcaggttatccgcacagcagaggaacagcttcacgcgcttgttcagtccgcgcgtaatggcaaatgccagcgccccggtaaccgttgccgcgccgcccatgtcgctcttcatgctgtccataaacgcagtctgtttgatgctgtagccgccggagtcaaaagtgatacctttacctaccaggcacgcgtacactggcgcttctttatcgccagttgggttgtaatccagcgccagcaataccggagaacgttcactaccgcgtccgactgtgtgcagccccatataaccttgctcacgcagatcttcgcctttggtgatccgataagtcacacgatcgcccgcgacgttgctgatcagatcaacagcacgctgtgccagttggcttggtcccaattcttctgccggtgcgttgatggtgtcacgcacccagtcgatgatcatcaggcggttatccagttcctggcgctgggcatcgtccagatccggccacaccactttacgcgtgcctttcggggctttgtaaccttgccagaatgcccagcagcgatccgcatcccagccttcaccgcttaactgaacatgcttgatgcccagaccgtcaatcttgcgcgccgcacgctggatcagccccagatcgtctgccccgttcaaatgcagggtaatgccgtcattattaatgctgtaagttgctttttctccccagcgcgcgtcggcaggttgggtagagagggtaatcttcatcgcttctgtcattttagttatccttctttgtaaaagggccgccagttggcagccccaggatttttccgctaaatgattcgcgttgcaggaaggcggcaagtgagtgaagccccaggagcatagataactatgtgactggggtgaacgagcgcagccaacgcatctgcggcgtgaagcatgacgcggaaattattcggcctcgtccagccagactaacaaaatcgcttcgaggattttctcgttggatgcctgcgggtcgtcgtcgaaatcttccagatcgcaaatccactgatgcatatcggtgaatcgaaccgttttcggatcaagatcgggatacgcatcgtacagtgcttcgccaatttcgcggctatcggtccacttaagtcccatactaacctctgttaatgctcacgcgcatggttgatagtgtaacgcgggatttcgactactaaatcttcgtcggtaacgcgcgcctggcagcttaaacggctttccggctccagtccccaggctttgtccagcatgtcgtcttcctgctcactgctttccggcagactgtcaaaaccttcacgaacgatgcagtggcaggtggtgcaagcacaggatttttcacaggcgtgttcaatctcgataccgttacgcagagctgcgtcgagaatggtttcaccgctattagcttccagaacagcgccatcagggcagagatcctgatgaggcaaaataacaatctttggcatattaaacctcgtccacggaatggcctttcagcgcacgacgaacgctctggtccatgcggcgagcggcgaaatcctgggtttgtttgtctacgtttttaatcgcttgttcgatggcgtcaacatcatcgccctgcgccacttcactcaggtgagcggcagcatcgtcaatgacctgacgttctgcggcgcttaacagcgcggcatcagcagccagcgcgccgtgcagactttccagcacacgcgccgcttctactttttgttctgccagcattcgggcttttacgtcctgctcggcatagctcatactgtctttgatcatgctagcgatttcgctatcggtcagaccgtaagacggtttgacctgaatagacgcctcaacgccggtggatttctccatcgccgtcacgctcaaaagaccgtcggcatcgacctggaacgtcacgcgaatatgcgcaccgccagccggtagcgccggaataccacgcagcgcaaaacgcgccagactgcggcagtcctgcaccagttcgcgctcaccctgcattacatggatagacatcgccgtctgaccatctttaaaggtggtgaaatcctgagcgcgggccaccggaatagtggtattacgcggaatcactttctccaccaggccgcccatcgtttcgaggcccaggctcagtgggatcacatcaagcaacagcatttcgctgtctggcttgttacccaccagaatatccgcctgaatcgccgcgccaatagcgacgactttatccgggtcgatggaagtcagcggtggacgaccgaaaaattcgcctacccgttcacgcaccagcggcacgcgagtagaaccgcccaccatcaccacttccagcacttcatcagcttctacacccgcgtctttcagcgcgcgacgacaagccagtaaggttcgttttaccagtggcgcgatcagttcattgaattgttcacggctgatttcgccctgccagcccgcaacgttaacggtcacggagtccgcatcgctcagcgcgattttggctgcaatggcggcatccagcagttcacgctgaacgcggttatcgctacgatcaggaatgcccgcctgctcgcgaatgtaatccgccagcagatggtcgaaatcatcgccgccgagcgcggaatcaccgccggttgccagcacttcaaacacgccgcgacttaagcgcagaatggaaatatcaaacgtcccgccaccgaggtcataaacggcgatcacgccttcctgaccggaatccagcccgtaggcgatagccgcagcggtcggttcgttaagtaagcgcaggacgtgaaggcccgccagacgcgccgcgtctttggtgccctgacgctgggcatcgtcaaagtacgccggaacggtgataactacaccatccagctcgcctgccagggcttcagttgcccgcgccgccagtgctttgaggatgtccgcagaaacgcgcaccgggttcagcagccccgccgccgtttcaatcatcggcaggccgttttcgctggcctggaattgataaggcagatgcggatagcgttgctggatatcagccaggctgcgtcccatcaggcgtttaacagaactaattgtgttggcggtatcgagcgctgcattagtacgcgcgtcataacccacgctatgcccttgctgttgatagtgaacaacagatggcagcaggtgacggccttcatgatcggctaacgtttcggcctgaccgctgcgcactgtcgccaccaggctgttggttgtgcccaggtcaataccggccgccagacgacgctgatgcggcgcagcactcaaaccaggttcactaatttgtaataaggccatgtttagcttccagaaattaaaaatcgagcagtttttcttcgagttgttcggcactgcttcgcagtttatcgagaaaacgcagcttacgcacggtatccgccgccgcgtcccacgtctcgttgtctaactgttcaaccatcaactgatggcgggtatcaaacatctttttcacacgtttgataaagctttccagccgcgcttcatctttcgcctgttcgatctcgtccagctcttcgcgcagctccaactgttccatcaggaacgcggtgtcgcgcacagtatgctgctcgctggcgagatcaaagccgtgcaaagaaagcaaatattccgcgcgcattaacggatgacgcagcgtttgccaggcctggttaatggttgcagattgctgtacggcggcgagttgttccgcctggcttccgctggcgaatttatcaggatgatactgacgttgtagatcctgaaaacgcaggctcagcgcctgggtatcgagttgatagcgggcaggcaagccaaagagggtgaagtaatccataacattctcagggctgcgatccgccgcgataacggcgaatcaggtaaaacaaaccccacgcgcaggcgaccacggtggggttatcggtatgcgcatcaaacgtggaagctttcgccgcaaccacactcatctttgacgttcgggttggtgaatttaaacccttcgttcaggccttcttttacgaagtccagctgcgtaccgtccagaaattgcaggctcttgccatcgaccacgactttcacgcctttgtcttcaaacacgatgtcttccggcgtcggttcgtcaacaaattccagtacataagccataccactacacccggaggttctcacgcccagacgcaggccaaaccctttaccgcggttagccagaaaggtatttactcgcgctgctgcactgtcgctcagtgtaatgctcataaccaaacctcaactcttattttgcttcacgtttgcttttatagtccgcaatggcggctttgatcgcgtcttctgccagaatagaacagtgaattttcaccggcggcagttcaagttcttcagcaatatcggtgtttttgatcgcctgcgcttcgtcgagagacttccctttcacccattcggtgaccagggagctggaagcgatagcggaaccgcagccgtaagttttaaaacgcgcgtcttcaatgataccttcatcgttgactttaatctgcaacttcatcacgtcgccacaggccggtgcccccaccatgccgctgccgacgttctcgtcgttgttgtcaaaggaacccacgttacgcggattctcgtaatggtcgataactttttcgctgtaagccattataaattctcctgattccgataccgattaatgatgagcccattcgatgctgttcagatccacgccctgcttgtacatttcccacagcggagaaaggtcacgcagacgaccgatggatttacgaactaactcgatggtgtagtcgatctcttcttcagtagtaaaacgacctaaagagaaacggatagagctatgtgccagctcgtcgttcagccccagcgcgcgcagcacgtaggacggttcgaggcttgcactcgtacaggcggaaccactagaaactgcgaggtctttcagcgccataatcaggctctcaccttcaacgtagttgaagctgacgttgagaatgttcggcgcaccgtgttccaggtcaccgttcaggtaaacttcttcgatatctttgatgccgttccacagacggttacgcaggccgcgcagacgttccatctcggtcgccatctcttcttttgcgatgcgataggcctcgcccattccgacgatctggtgaacaggcagagtgccggaacgcataccgcgctcgtgaccgccgccgtgcatttgcgcttcgatgcgtacgcgcggtttacgacgtacatacagcgcaccgatacctttcgggccatagattttgtgaccggagaaagacatcaggtcaactttcaactggctcaggtcgataggcagtttacccacgctctgggttgcatcaacgtgatagataatgccacgagcacggcacatttcgccgatagccgcgatatcctgcaccacgccgatttcgttatttacgtgcatgatggacacgaggatggtgtcgtcacgcatcgctgcttcaagttctttcaggtcgataatgccgttacgctgcggtgccaggtaggtgacttcaaaaccttcgcgctccagctgacggcaggtatccagtaccgctttgtgttcggttttgctggtgatgatgtgcttgccttttttctgataaaagttggctgcacctttgatcgccaggttgtcagattcggttgcaccagaggtaaagacgatttcacgcggatcagcgccgaccagatcggcaatctgattacgggcgatatctaccgcttcttcagcctgccagccgaaacggtgagaacgggaggccgggttaccaaaggttccgtccatcgtcataaactgcatcattttctcggcaacacgcgggtccaccggcgtggttgcggagtagtcgagataaatcggtaatttcattgctctataaactccgtacatcactcaatgcaaggaatcaggctaccggctggatgtacgaccgtgtttacggagtatttagcactccggcctgattctgaattctttttattaagcgcgtaacttaacgtcgatcgcgtcttgtgtgcgggtgcgtggcgcgtcgtgagtatgctgacgaccagacacatccagcacttcctggttattaaccagttcgcctaaagtaatgttgttgagaaaaccggtgagacggtcgctcaaatcacgccacagcgcgtgggtcaggcatttatcgccgccctggcagccgcctttaccctgacaacgggtggcatctacagattcgtcaacggcgctaattacttcgccaacggcgatgctgctggcatctttgcctaacagataaccaccgcctggtccacgtacgctggaaaccagaccatttttacgcagacgggaaaacagttgttccagataagaaagggaaattccctgacgttcggaaatatcagccaacggtaccgggcccgcttcagagttgagcgcaacgtcaagcattgcggtcacggcatagcgccctttagatgtcagtctcatgtcttacttcacctcaaactcgcccctgcccggggttttttattgtaaaagtgggggtattgcatagcagggtcaagtctgacattcccgagtaaattggtcaactatttacttgactgatttagtcgggtatttaaccttcagtgccatttttttatcgtggcgtttgtacctgttgtcggatgcggcgtgaacgccatatccgccctggggttctgtacactgtaggcctgataagacgcattacgcgtcgcatcaggcaacggctgtcggatgcggcgtgaacgccttatccgacctacggttctgttcactgtaggcctgataagacgcattacgcgtcgcatcaggcaacggctgtcggatgcggcgtgaacgccttatccgacctacggttctgttcactgtaggcctgataagacgcattacgcgtcgcatcaggcaacggctgttattcggccttgttacctttattctgctgctcaatagaagccagaatcccgcgcaggatattcaactcctggctttccgggcgcgcacgggtaaacagacggcgcaatttattcatcacctgccccggatggttttcacggataaaaccggttgccagcagcgtttgttccagatgaccataaaaacgctccagatcatcgaccagcggatacggcgtctcttcatgctcgacctgctcgccgttttcctgagttgccagccaggccatgcgcacttcataggcaataacctgaaccgccatcgccaggttcaggctgctgtattccgggttagccgcaatcgcgacatgataatggcatttctgcaactcttcattggtcaagccgacgcgctcgcgaccaaacaccagcgccaccggggtatttgccgcttcagcgacgcttttcaggccgcattcgcgcgggtcgagcatcggccatggcagcgtgcgggaacgtgcgctggtgcccaccaccaggctacaaccggctaacgcttcgtcgagcgtatcgacgatgtgagcattaccaatcacatcgctggcccctgctgccagggcaatcgcctgggagtcgggtttcaccagtggattaaccagccacagattggttaatcccattgttttcatggcacgggcaacagaacccatattgccggtgtgactcgtctccaccagcacaattcgaatattttgcagcattgtctttcttcatctaaagattattcacgcatcttatcataaaacgaagacagatgccgatctcgctgctatactctgcgccgttttcccgttctttaacatccagtgagagagaccgatgcatccgatgctgaacatcgccgtgcgcgcagcgcgcaaggcgggtaatttaattgccaaaaactatgaaaccccggacgctgtagaagcgagccagaaaggcagtaacgatttcgtgaccaacgtagataaagctgccgaagcggtgattatcgacacgattcgtaaatcttacccacagcacaccatcatcaccgaagaaagcggtgaacttgaaggtactgatcaggatgttcaatgggttatcgatccactggatggcactaccaactttatcaaacgtctgccgcacttcgcggtatctatcgctgttcgtatcaaaggccgcaccgaagttgctgtggtatacgatcctatgcgtaacgaactgttcaccgccactcgcggtcagggcgcacagctgaacggctaccgactgcgcggcagcaccgctcgcgatctcgacggtactattctggcgaccggcttcccgttcaaagcaaaacagtacgccactacctacatcaacatcgtcggcaaactgttcaacgaatgtgcagacttccgtcgtaccggttctgcggcgctggatctggcttacgtcgctgcgggtcgtgttgacggtttctttgaaatcggtctgcgcccgtgggacttcgccgcaggcgagctgctggttcgtgaagcgggcggcatcgtcagcgacttcaccggtggtcataactacatgctgaccggtaacatcgttgctggtaacccgcgcgttgttaaagccatgctggcgaacatgcgtgacgagttaagcgacgctctgaagcgttaatgactcaggcgggtgatatcactcacccgccctcgcctttcaggcgctattccgaaatacttcctcactgctttactttctttcgtcactctcccaccatctttccccgattaatggatgataaagaagagccaaggaaaggttatggcactgccagtgaacaaacgcgttcccaaaattctgtttattctctttgttgttgccttctgcgtttatttagtgccgcgcgttgccatcaacttcttctattatcccgacgataaaatttacggtcccgatccctggagcgcggaatccgtcgaatttacggctaaggacggtactcgtctgcaaggctggtttatcccttctagcacgggccctgctgacaacgccatcgcaaccatcattcatgctcacggcaatgccggaaatatgtccgcccactggccgctggtcagttggttacccgagcgtaatttcaacgtttttatgtttgattatcgcgggtttggtaaaagtaaaggcacgccgtcccaggccggattgctggacgatacgcaaagtgccatcaatgtggtgcgccatcgcagtgatgtaaacccacaacgtctggtgctgttcgggcagagtattggcggggcgaatattctggatgttattggtcggggtgatcgtgaaggcatacgtgcggtgatcctcgactccacatttgcctcttatgcaaccatcgccaaccaaatgatccccggcagtggctacttacttgatgagagttacagcggcgaaaattatatcgccagcgtcagcccgatcccgcttttactcattcacggtaaagctgatcacgttatcccatggcagcacagcgaaaagttgtatagcctggcaaaagagccaaaacggttgatcctaatcccggatggcgaacacattgatgctttttccgatcgtcacggcgatgtttatcgcgaacagatggtggactttatccttagcgcgttgaatccgcagaactaacccatgatcgctagcacgataatcattcacaaaaccaccttaagacatgctaatccactggtcagaacagtttaagatgagaaaaattctgtgacgcttgccaacatttctgatgattagcattcccttcgccatttccttgagcaaactttagctattcttatcaattatgcttatgggagatctacagatgatgcctacgcttgctccaccatctgtccttagcgctccccagcgccgctgccagatcttgctgacgctctttcagccggggttgaccgccaccatggcaaccttcagcgagcttaatggtgtggatgatgatattgccagtcttgatatcagcgaaacaggacgggagatcctgcgctatcatcaactcacactgacgactggttatgacggtagctaccgggttgaaggtacagtgcttaaccaacgtttgtgtttatttcactggctacgacgtggtttccgtctgtgtccgagttttattaccagccaattcacccccgccctgaagagtgaactgaagcggcgcggaattgcgcgtaacttttacgacgataccaatctacaagcgttagtgaatctctgctcccgacggctgcaaaaacgctttgaaagccgcgatattcatttcctgtgtctgtatctgcaatattgtttgctgcagcaccacgctggaattacgcctcagtttaatccgctccaacgtcgctgggcggaatcctgccttgaatttcaggtagcgcaggaaattggacgccactggcagcgtcgggcgctccagcctgtaccacctgatgagccactgtttatggcactacttttttccatgttgcgggttcccgatccattgcgggatgcgcatcagcgggacagacaattgcgtcagtctatcaaacgtctggtaaaccattttcgtgagctgggaaatgttcgtttttatgatgaacaggggttatgtgatcagctttatacccacctcgcccaggcgttaaatcgcagtttgtttgccatcggtattgataataccctgccggaagagttcgccagactgtacccacgcctggtgcgcaccacccgcgcggcgctggccggatttgaaagtgaatacggcgtccatctttctgatgaggaaagtggtctggtcgcggtgattttcggtgcctggctaatgcaggaaaacgatctgcatgaaaaacagattattcttcttaccgggaatgatagcgagcgagaagcgcagattgagcagcagttacgcgaactaacgttactgccgctcaacattaagcatatgagcgtaaaggcatttttgcagacaggcgctccgcgtggcgcggcactgattattgcgccttataccatgccattaccgctctttagtccaccgctgatctatacggacctgacgctgacaacacatcaacaggagcagatccgcaaaatgctcgaaagtgcatgatcagcaactgggaacaactttcgggcgcaaaaacattgccggaagcgccaccagcgccattacccagaacacgccgtggcccagatattgatacaggaaaccggcgaaaacggtcatgatagcgatactgccgcccatcgcgacggcagagtaaaccgcctgtaaacggatgacttcgctaccctggcgagcagcaatataacgcatggcggccaggtggcagaccgtgaaggtgccgcaatgcagaatttgcaccactatcaaccacggcaacgccgtagttgctcccataatgccccagcgcactacgccgcaaatcgcgctgatcaacagcatatcgcgtgcactacaacggcggaaaagtttattactcagcgcaaagataatgacttccgccaccacgcccaggctccacaaataccccaccgcgctggcgctgtagccagctgcctgccagtaaatggcgctaaaaccgtaataggccgcatgtgccccctgcaataaacaaacgcaggccagaaagcgccagttctggcgaaccagcgccaaccacgcagaccaaccggtgctctcctgctggcgacttgccccttgtggctgaatcgtcggacggatgagaaagccgagcagcatggatgccacgcccaacgtcaacagcgcgaggatcacccgataatcaaacatagtgaccagtttgcccgtcagcgcgctgccaatgacaaacgccacgctgccccacagtcgcactttgccgtaatcaagcgggaactgcttttgccacgtattcgccagtgcatcggtcaacggtaccagtggactgaaaaagaggttaaagccaatcatcaccagcatcagccacgctacgtgcgcccccgcccagaaggcgacagcaaagagaagtgtcagcagtgccagcacgcgcaaggcggaaatcaggcgggaaggatcgctgacgcggggcgcgatgagcaaactcccgaggaaacgggcaaccagacctgcccccaataacaggccgatggtttctggcgttaaaccaatccctttaagccagacgctccagaaaggtagaaaaatgccgtaactaaaaaagtatgtgaaatagccgagcgccaaccagcgcgtggattgcaaaaccatgagtccctcccgtcaggaggcgttagtctggggttaatcgaatgttggtgcaagttgaaaaataagaatattcgagcctgcttcccgatgtctgtaacgccagttcacaagcactaaaaaactgagatccgcgacgcatgttgcaaaaataatgcgtaattatgccgttacgcttgccaaacgttcctgcacaatggcgatgaaatcgcgtaatgccggcttcatctcccctttcttccacgccatcagtaaagcaatggaaggcacatttccggcaatgggacgaaaaacaacctgtccggtattaaaattattcatataaccgggtatcaaagtgacgcccagccccatgcccaccagattcatggtcaccagaatattcgttgccacctggacgatatttggctggctgttttcttgcgcaaaccacgctttaacgatcggcgcaaggctaccggaatacaccggatcggtactgacgaaattcacgccatccagttgcgcggcggtgatctctttttcatgtgctaaagggtgatcaaccggtaacacaaccactaatggttcgtcaaaaagctccagataatcaatctccgggctataaacaggatggcgcattaagccgacgtcgagttcaccacggcgaattttttcctcctgttgcgtggtgattaaactcaccagctcaatcaaggtgtctggctgtctgagacgaaacatcggtaatacttttggcagtaaattcacttccgcgcttggcacaaagccaatggttaattgtctgtcttcctgaacaattttccgcgcccgtaatttggcattttccgcttgttcgaggattgccagcgcgtcctggagaaaacattctcccgccgccgtcaacgcgactttgcgcttatccctcaccagtaacggaacaccgacacagttttcaagatcgcggatctggctgcttaagctaggctgactggtatgcagtttttccgccgcacgggtaaagttcagtgcctgcgccactgcgacgaaatagcgtaaatgccgtagttccatcaccttccccttgttatcgaaaaaacgtctcagctggtagaaattaactatttcacatattagcaaccaaccagcaacatccttatggcacaaaaatagaaggtcaatacatcttatctttcaggattaaaaaatatgaccacacccagtgatttgaacatttaccaactgattgacacccaaaatggtcgggtcactccgcgtatttataccgacccggatatttaccaactggagcttgagcgtattttcggtcgttgctggctatttctcgcccacgaaagccagatcccaaaacccggtgatttctttaacacctacatgggagaagatgcggttgtcgtagtgcgtcagaaagacggcagcatcaaggcgtttctcaaccaatgccgccaccgggccatgcgtgtgagttatgcagattgcggcaacactcgcgcctttacctgcccgtatcacggctggtcttatggcattaacggcgagttgatcgatgtaccgctggaacctcgcgcctacccacaagggttgtgtaaatcccactggggactaaacgaagttccttgtgtggagagttataaagggctaatttttggcaactgggataccagcgcaccgggcctgcgtgattacctgggtgacattgcctggtatctggatggcatgctggatcgtcgcgaaggcggcaccgaaattgtcggcggcgtacaaaagtgggtgatcaactgtaactggaaattcccggcagagcagttcgccagtgaccagtatcatgctctgttcagccatgcttctgccgttcaggtattaggggcgaaagatgatggcagcgataagcgcctcggtgatggacaaaccgcccgcccggtgtgggaaaccgccaaagatgcgctgcaatttggtcaggacggtcacggtagcggtttcttctttactgaaaaaccggatgctaatgtctgggtcgatggcgcagttagtagctattaccgcgaaacctatgccgaagcagaacaacgtttaggtgaagttcgcgccctgcgcctggcgggtcataacaatattttccccacgcttagttggctaaacggcactgccacactccgcgtctggcatccgcgcggccctgatcaagttgaagtgtgggcgttctgtattactgacaaagccgcctccgatgaagttaaagccgcttttgaaaacagcgccactcgtgcttttggtcctgctggttttctcgagcaggatgacagcgagaactggtgtgaaatccagaaattgcttaaaggccaccgcgcccgcaacagcaaactgtgtctggaaatggggcttggtcaggaaaagcgccgcgacgacggcattcctggcattactaactatatctttagtgaaactgccgctcgtggaatgtaccaacgctgggccgatcttctgagtagcgaaagctggcaggaagtgctcgataaaaccgccgcttaccagcaggaggtgatgaaatgagtgcgcaagttagtctagagttacatcaccgcattagccagtttctctttcacgaagccagcttactggacgactggaaatttcgtgactggctggcgcagctcgacgaagagattcgttacaccatgcgcaccacagttaacgcgcaaacacgcgaccgccgcaaaggcgtccagccaccgacaacctggatttttaatgacaccaaagaccagctggagcggcgaatcgcccgtctggaaacgggcatggcctgggcagaagagccgccgagtcgcacccgtcacttaatcagcaactgccagataagcgaaaccgacatcccaaacgtatttgctgtgcgggtaaattatctgctttatcgggcacaaaaagagcgcgatgaaacattctatgttggaacgcgtttcgacaaagttcgccgtctggaagatgacaactggcgcttgctggaacgggatatcgtcctggatcaagcggtaatcacttcccataacctgagtgtactgttctgatgaatcgaatttatgcgtgtcccgttgcggatgtgccggagggtgaggctctccggatcgataccagccccgtcatcgccctgttcaacgttggcggcgagttttatgccattaacgatcgttgcagccatggtaatgcgagtatgagtgaagggtatctggaagatgacgccacggtggagtgcccgctacacgccgccagtttttgcctgaaaacggggaaagcgttatgcctgcccgccaccgatccgctcaccacttatccagtacacgttgaaggtggtgacattttcatcgacttaccggaggcgcagccatgagcgatctgcataacgagtccatttttattaccggcggcggaagcggattagggctggcgctggtcgagcgatttatcgaagaaggcgcgcaggttgccacgctggaactgagcgcggcaaaagtcgccagtctgcgtcagcgatttggcgaacatattctggcggtggaaggtaacgtgacctgttatgccgattatcaacgcgcggtcgatcagatcctgactcgttccggcaagctggattgttttatcggcaatgcaggcatctgggatcacaatgccagtctggttaatactcccgcagagacgctcgaaaccggcttccacgagctgtttaacgtcaatgttctcggttacctgctgggcgcaaaagcctgcgctccggcgttaatcgccagtgaaggcagcatgattttcacactgagtaatgccgcctggtatcctggcggcggtggcccgctgtacaccgccagtaaacatgccgcaaccggacttattcgccaactggcttatgaactggcaccgaaagtgcgggtgaatggcgtcggcccgtgtggtatggccagcgacctgcgcggcccacaggcgctcgggcaaagtgaaaccagcataatgcagtctctgacgccggagaaaattgccgccattttaccgctgcaatttttcccgcaaccggcggattttacggggccgtatgtgatgttgacaagccggcgcaataatcgcgcattaagcggtgtgatgatcaacgctgatgcgggtttagcgattcgcggcattcgccacgtagcggctgggctggatctttaaggaagcacgatgaaagaaaaaacgatcattattgtcggtggcgggcaagcggcggcaatggctgcggccagcctacgccagcaagggttcaccggtgagctgcatctgttttccgatgagcgacatcttccttatgaacgacctccactcagcaaatccatgttgctggaagattccccgcagttacagcaggtgttacccgctaactggtggcaggaaaacaatgttcatctgcattccggtgtaaccatcaaaacgctgggtcgcgacacacgagagttagtgttaaccaacggcgaaagctggcactgggatcagctttttatagcaaccggcgcggcagctcgaccgctgccgttgcttgatgcactgggagaacgctgctttaccctacgccatgccggtgatgccgccagactgcgagaagttctgcagcccgaacggagtgtcgtgattatcggtgccggaactattggtctggaactggctgccagcgccacgcagcgcagatgtaaggtgacagtgattgaactggcggcaaccgtcatgggccgtaatgcaccaccgcccgtgcaacgctatcttttacagcgccaccagcaggctggtgtgcgcattctgctcaataatgccattgaacatgtggtcgatggtgaaaaagtagaactgacgctgcaaagtggggaaacgcttcaggctgatgtggtgatttacggtattggtatcagcgccaacgagcaactggctcgcgaggccaaccttgatactgccaatggcattgtcattgatgaggcttgccgcacctgcgatcccgcgatctttgccggtggcgatgtggcaatcactcgtcttgataatggtgcactacaccgctgcgaaagctgggaaaacgccaataaccaggcgcaaattgccgctgccgcaatgttagggctaccgctaccgctactgccgccgccgtggttctggagcgatcagtacagtgataacttacagtttattggcgatatgcgtggcgatgactggctttgtcgtggcaacccggaaactcagaaggcgatttggtttaatctgcaaaacggcgtgcttatcggtgcggtcacgctgaatcaggggcgtgagattcgcccaattcgcaaatggatccagagcggcaaaacgtttgatgcgaaactgctgatagatgagaacatcgcgcttaaaagtctgtaaccaggataattagcgaatatctcaatgcctggggcgtggcgaggtgcaagagtgtgtattacgtttaaaagtcattatcttgcaaagggattggttatgaacacactacgttattttgattttggagctgcccgccccgttttgttattaattgcccgtatcgccgtggtcttaattttcattatttttggttttcccaaaatgatgggctttgacggtacggtccaatatatggccagcttgggcgcgccaatgccgatgctggcagcgattattgcggtagttatggaagtgcccgccgcgatattaatcgtgcttggctttttcacccgtccgctggcggtgctgtttattttctacacgctgggtacggcggtgattggtcaccattactgggatatgaccggcgatgcggttgggccaaatatgattaatttctggaagaatgtcagtatcgctggcgcgttcttgctattggcaattaccgggccgggggcaatttctctcgatcggcgttaagaaagatgccggatgcggcgtgaacgccttatccggcatttaataaattacagccactctacccgcaagctcatctcactagttgtactttcccctggtgctagcgcaatgagatcacccccttccgggcgatgatgatcatccggcgcatggctcatcggttccagacagaagaaatcaaacgcatatcctttatcaaacgcagggtcggaaacaaagatgaaataacacggtgcaggtggcgtcgtttccatgatgatggcataaccttcctgcggctgctcgatgcgggcctgaccattccatccggcaaaaccattgttcacccactggcgcggcaacggcgcgggctggttaaaatccagttcctgcggtagctgctcgcaaaactcacccgccagccactgctcccgctccagccagtaaccgctcgcctgtgcctgaatccgcgtttgcgggctcaacggaaaataaggatgccagccggtaccaaatggcagcgtctctgccccttgattggtgacagagagcgtcaccgtcagcgtatccgccgttaaatgaaacgcctgacttacccgatagtgatagacaccgctgcgatgttcatacaccagacacaaactatcatcgctgtggctgacacattgccactcgcccagccagccatcgccgtgtagatagtgcgcatcccactcaacattcggttgcagttgatactcacgcccctgccagacaaaacgattgccgctcacccggtttgcaaatggcaccagcggaaaacaactggcatcggttgccacaccgctttttttaccaggacgtaagagcggcgtcgtatcgcgccagaagccttcgattacgccgccctggtcagaaacgtccagctttaggctcccgtgggataaggtatagatggtcatccgctaactccttaatccgggaagttaatcacaactttcccgcatttgccgctcgccatcagcgcataggcatcacctgcctgttccaggctgaagcgatgggtaatggcgttacgcggccacagcttccagtccgtcagatcatgggcgcatttttccatatggaacagactggtcacccaggagccgataatccgccgttgatggtgcatcagatcggcgctgacctcgaattccacttttccggtttcaccaatgtaaaccacccgtccccagtcagcggtggattgcagtgccagcaagcgacctgcggcattaccggaacaatcgagcgcaacatccgcgccaccgtgggtgagttcggcgataatctgcggcagaccttcggtggttgctaaatagccgtgatccatcacccctaactgttttgccatcgccagacgttccggcagcatatcaacgccgatgatccgttttgcaccgcgacctttcgccagcatcatcgccatcatgccgactggccccagaccgaccaccagcacgttatcactgccggaaacttcgccgcgcaaaattccttcatacgctgtaccaacgccgcaactgataaacgcaccatcttcgtagctcagcgcatccggcaggaggatcagatctttttcttccgccagcaagtattcggcatgaccgccgtcacgctgccagccgtaagccgcttttccttcgccagtacaagaaataggaaaaccgcgacggcagttcgggcaaaaaccacagccagaaatgtgatacaccagcacgcggtcgccctctttaaaatggcggcagccttgccccatcgccacaatctgcccgcacggttcatgaccgttgataaagccctggtataacggtttatcgggtgccgccgctgtggcacggtgttgatgatagatatagtggacatcgcttccgcaaatcccggaggatttcattttgatcagtacctggttaatccccggcgtcggcaccgcaacttcccgcagatcgacggtgctatttcctggtaaataagctgccagcatcgttttcataaatccctcattaacaatacgattaattttcatccctgccgcacccgcgccaggggcgttaaggtttagcgtttcgctttactgcttcgctgggtcagcaagatattcgccagcaccgccaccacgatgatgacgccgcgtaccacctgctggaaaaaggagttaataccgagcagcaccagaccgttaccgattagcgtaatcaccagcacaccaagcaatgtaccgaacagggaaccgcgaccgccggaaagtgccgtaccgccgaccacgaccgcggcgatgacgtcaaactccagaccgtttgcggcacctgcgttaccagaaccgaggcgcgccgccaacaaaatgccggtcaccgccgctaataatccgctaagggtaaagataagaatgcgcacccgacgaacgttgatgccgcacaactgcgccgccgtagcattaccgccaacggcaaaaacgctgcgcccgaaggcggttttgcggctgatgaacacaaacagcgcaaacaacacaatcatgatcagcgcggataccggcacaccgagaaattgtccgcccagccagtccagcacctcgttttcatcaatcggcactggcagtgcgttcgtcataaacagccccattccgcgcagggcgctccacagccccagtgtggcaacgaaacttggtacattaaacacgccgcgcagcaccccggccagcgttcccatcagcgcgcctaacagcaacaccagcaggcacgccaccgccagcggaacttcaaattgcagcaaaaatgccaggcacacgctgacaaaagccaccatcggcccaacgctgacatcaatttcaccggagataataatcagcgtcatcgcccaggcggcaatcccaatggtggcggcatcgcgcagcacgttcatctggttattcaaactgataaagccaggcgcgttcagggagaagaccagataaagaatggcaatcaccaccagcaaaccgatctcattaatatggcgactgacaaattgtttgaggctgacgctcttgccctgcggcaatggtaaactgctagcagacatcttcaggttcctcggtaaaattcatcagtgcacagacagaatggcggacatcagctcatccacattgaccggagcgtgaaactcctggctgaacgtgccgtgctgtaataacaggatgcggtcacacaccagcggcaactcctccacttcactggagataaacaccacgctttttccttcggcagccagctcacggacaatacggtaaatctgctgtttggcttcgatatcgacgccgcgcgttggctcgtcgagcaacaaaatctggctggcagcatagacccaacgaccgatcaccactttttgctgattgccaccagaaagcgtgccgatgggtgtttcgctactggcggccttgaccgtcatccgctgcatcacctcttcggtcaggcggcggatggtggaccattgcagcacaccgttggcgctgattttttgccgattggtcagcactgtattttcgtcaacgcccaaccagggaatgatccccgcttctttgcggttttctggcgtatagccaatgccgcgtttcagcatgtcgccgtaatcggggcgcgtgattttctcgccgttgataacaatttcgccctgttcatactcctccagcccaacaatcgccttcagcaattcactgcgccctgcccccagcagaccagcaatgccgagcacttcgccacgacgtagcgtaaaactgatatcctccagcttgggcttatggcgtaacgcacggacttccagcacggcctgatccacaatttcctgaggggctaccggcgcaatatcaacgtgatcgcgcccgagcatcaggctcacaatatgatgcgtggaggtgttttcgagcatcacatcgcccgccacctgaccatcgcgcataacggtggcacaggaggcaatgcggcgaatttcttccatccggtggctgacataaatcaccgccacgcccagtgcgctcatctttttcaccgcgctgatcaccagttcaacttccgcactcgcaaggctactggtaggttcatcaagaatgaccacgcgcggctcgcccttcatcacccgcgcaatttccaccagctgcttttgcgccgggcttagcgtactaacaagttgttcaggactaacgtcaacgcccagcgcctgtaagcaacgttgggcatcctgcgccatttgcaggtaatcaatcatgccgttgcggcggggccactgaccgaggcagaggttttccgccactgtcagcccttccaccagacttaactcctgataaaccgcgcgcacccccagttcagcggcacggcgagtcagcgtagcttcgtcaccttccagtcgcgtctcgccaatccagatatcaccgctatccgggcgttcgctgccggtaagcattcgaatgagagtgcttttgcccgcgccgtttttacctaacagcgcacgaacttcgcctttattgagcgtgaagttaacgttatccagcgcaacgacgccgggataacgcttatttcctgccaccacttttgctaccgggactgcctctgttgccgtgaacatagggacctctgcgaatcagcgattagggcagaccatcaacgtgcgttgccagccactgtttaccgtcttccgttttggtatagagatcgataggcacctgaatcactttttcaccgtcggcttgtttattgataaccttcaatgtttgcgcgaaaacagcattgcccattttcttaccggaaatatccactaccgctttcagcacctgattgttttccagctcctgagcaatttcggttgtcatatcgctaccgaaaacagcaatttttccggcctgattttgattacgtaccgcttttaccgcgccgagtgtcgcaccgccgctttcccccataatggcgttgagatccggcgtggagataattagtttttcaccaacggaaatcgctttatctaaaacagtcccttcctgattagcgacaatttgcgcgccgggaacgcgggattttaaaacttcttcaaatcctttacgtcgctgcacacaaacttcaaaggcttcgcaattgatgacggcaattttcggctggtcaattttattggcaataaaataatcagcggcagcgttacccagttttttaccaaattccagcggatcgccgaccagatacgcgctgacatatttatcgacccccttttgattaatacaggtgttgtagcaaatcaccggaatgcccgcttcactggcgcgacgaacggtacggctactgccattttcagacactgcgcttaaaataatggcatcgacattacgcgccacgagggtatcaacaaaggtactttctttgctaatatcaccctgggcgttagtttctattaactgaacttgtacactggaatcttttgccgcatcctgaacgccctgacgcactccagcgtagtatccctgagtatcaaggtatattgcgccaatggtcatttctttttccgcagccctggcaaatagtgcgctacctaatagcgtagccattaataatagattacgggttgttctcatttttgtaggcatagagcctcctgtagggtttttattaacaacggcttattctaattattttgtgatgagcggcagcgcgtgccgctcaaatattacagttaatagggtttagtgaacgcggttaaaaataaaaggcatcacggtggtgaataatgccgctttcggccaagccggattaatcgccgtcaattcagcgcgagcagactcatattgcgcaacctccccgagtcccgcggacgccagcatcgccaccatcaggcatttttctttatgctgctgttgtaaatcgccatacaggctcaacaagtcaggttggctgacggcaaagaaatccgcttcgatactggttttcgccatctcttgcgcccactgtttcatttcactaaacagttgctgtgcggtttgttgttcgcccagcagtcgcagcgccatcccttgccagaagagataatcaaccggctgatcgttgtaataactgtgaatgttaatagtgcgatcgccggtcgccgccagacgtaaacaacgcgtcgcttcagtttcatcgccctgcgcgttggcgcatatcgcctgccagaaccagatgtcgttatcagtttgccccggtaaacggccttcgcttaaattctccggataatgcagcgcggcatgaagcagttcgcaggcctgctgcggctgtctggcatcaagatgctgccaggcgcgtaataactggttgaggataaactgactggtgaccttcccttccccgccttcccacgggtggaatttgcgcgtggcgagaatgtccgccgctttgtctgcctgacccgtgagatgccacaaattgagcagttctgcggtcatgtcgtcgcgtttcagcgcaatttccagattattttccagacgcgccagtcgtttctccggtgtggctccacttaacttatccagcaaatcccgttcgaaaagcagacgtgcatcctgcggcgcaagctgataagcattatcaagataacgcgcggccagctcataatcgtgttgcttattccacgcatggatcgctaacccgcgccagccgtcggcaaactccgggctcatctctacgcaacgttgccaaaaggcaatggctttgttgtagctacgtttgttgtagtagaagcaagctagtaaatggcgagcaaaccagcactcttcaatactctccagcgccgccacttcttccagcgtattcgggaaacggacaaactgcgggaagacatcaatggcttttgcgaccagttcgccacgttcggctttcggcagcaagctggcttgcaggtaaagcggcagcgtgcgctggcagtccagtgcgttcagcatctctgccgccagggtgggcattccccagttaatcagttgcccggcggtcatcagggcgttaacgtcgcgtccctgacacagaccgcgccactgcgcgagagcactttcgctacgaccatcgaaccagttcagccaccacagagtggcgttcagcggataatcgcgcagcagtttctcgcgctgcacacgcgcgttgtcctgacgaccacttaacaccagcagcagattatgcaggcaaagcacttcctgattggttgggcaggcgcgaagactttgttggcaaaaatccagaccagcgtcgaagttaccattacgcgccgccagtcgtgccaggccataatagccaccggctttgctgttgccgctccagaccgcacgccagaaatcctcttcggcttgttgatattgtccctgacgttcgtaagcactggcgcgaatcaaactcgcctgtccgcactgcggatttttgttcagcgcatgtgcgcgtttcagagcctgagtggcatacgccaccgcttgcgggaaatctgcgcggttatattccagcatcgccagcgccaggttacagcgataatccagcgggtccagcgccacgccgcgcaggtagtaatcgaacggactacggctggcgtgatgatattgctccagatgctgaccgataaaccaggcttcatctgtactggtaatgtcttgtgctgccagtggcgctttggcgacgtccggtaacggcaacgcttgcggctgatgttcctgataactcagtacaatattgccgtcggcatcggagagctcaatggtcagcctttcaggattgataccgtgcaacacgccctggatggcggtcgcaggcatcagtgccacggcatcatcaagtaacgcgttgcatttaccgatttcgcggatcgccaggcggtatccgttcaacggagagatggcatacagcccccactcaatcccccgcttactacgctggagttttatcaccgcatcgcgggaggcattttgcaccatgcccaaagaatgataaggcaggaaatactgctcaaaacgcttctcttcgtaagcatcaagccaggtaaaatcgggctggttatcggcaaaaataccggtcatcagttcgatatacgggccgttattgtcggtcagactcttatcccacgcctggccaaattcactgtgtccccaactccactgttttttacctggcgcaatatggtggttggcaacgtgcagcaaaccgccatcttcatcgtgacaccacgcgccgacaaaatcgtactggcttttttcggccatataactggttggaacaggcacatttttatagcgagaaatgtccactccagcggagtagtccactttgtagtaagtgccggtagcgatggggaaagcggagacggcccgtttgccgtgatcaaacaccgccgttacatccggcgggaagacgctctgatgcccttccccccctttcactgccgggttggcccaccacaagaaatgacgcggcgtggcgttcccgttatagacgcggctggcgatttccagcgccgcccggtcagggcgcagggtgaaacctgtcatcacctgtaaaccatgcatcggctccgtttcgcctacccacaccgtctgtgcaccgtcttcatgggcttcgagggtgaaatcaacgggcataaaggtggtcgggcgatgatgttgcggccagttaaactcaatcccaccggaaatccacggccccagcagccccaccagcgcaggtttaatgacttcattgtgataaacaaaatcgcgctgtttcactttatcccacgcgcgatgcacccgaccgcccagttccggcaggatcatcactttgatgtagtcgttttccagccacaccgcctgccaggatttcagggttttctgctcgctcagcgtatcggtcacgccgtagggataaaccgcgccggagcttccctgataaacgcgattttccaggaacatgggatgtatatcctgcggcccggtttcataggtcgggatctcaacgcgctcttgccacacttttactggagtcatggtgccctcaatattaacaagacatactgaattaaaagatttgtggcagtgtattgaacaatctggcaatgttttcgcggaataatcacgcaattaactaaacaaggtttagtgaagatgagagcctgcattaataatcaacagattcgccaccataacaaatgcgtgattctggaactgctgtaccggcaaaagcgcgccaataaaagtacgctggcccggctggcgcaaattagcattccggcagtcagtaatattttgcaggaactggaaagcgaaaaacgggtggtgaatattgacgatgaaagccagacgcgcgggcatagtagcggtacatggctgattgcgccggaaggtgactggacgctgtgcctgaacgtgacgcccaccagtattgagtgtcaggttgctaatgcttgtttaagtccgaaaggtgaatttgagtatttacagattgatgcaccgacgccgcaggcgctgctgtccgaaatcgaaaaatgctggcatcgccaccgtaaattgtggccggaccataccatcaacctggcgttggcaatccacggtcaggttgatcctgtgaccggcgtgagccaaaccatgccgcaagcgccgtggacaacgccggtggaggtgaaatatctgctggaagagaagctcggcattcgggtgatggtcgataatgactgcgtgatgctggcgctggcggagaaatggcaaaataatagccaggaacgggatttctgcgtgatcaacgttgattacggcattggcagcagcttcgtgattaacgagcaaatttatcgcggcagtttgtatggtagcggacagattggtcacaccatcgttaatccggatggcgtcgtctgcgactgtggacgttatggctgcctggaaactgtcgccagcttaagcgcattaaaaaaacaggcgcgggtatggctaaaaagtcaaccggttagtactcaacttgatcctgaaaaactgactacagcgcagttaatcgctgcctggcaaagtggagaaccgtggatcaccagctgggttgatcgctctgccaatgccattggtttgagtctgtataacttcctcaacatcctcaatattaatcagatttggttgtacggtcgcagttgtgcctttggtgagaactggcttaatactattattcgccagacaggatttaacccgttcgaccgcgacgaaggaccgagcgtgaaagcgacgcaaattggctttgggcaattaagccgcgcacaacaggtgctgggaattggctatttgtatgttgaggcgcagttacgacagatttgatggcgcgataacgtagaaaggcttcccgaaggaagccttgatgatcataaacgaaaaattgcctgatgcgctacgcttatcaggcctacacggagattgcaatatattgaatttgcaaagttttgtaggccggataaggcgttcacgccgcatccggcatgaacaacgagcacattgacagcaaatcaccgtttcgcttatgcgtaaaccgggtaacgtgcgcagatgtcgagaactttacctttgatgcgctcgataacggcttcatcattgatgctgtccagcacgtcacacatccagccagccagttctttcgcttcggcttctttaaagccgcgacgggtaatcgccggagtacctacacgaataccggaggtcacaaacgggctcttcggatcgttcggtacgctgtttttgttgacggtgatgttagcacggcccagagcggcgtctgcttctttaccggtcaggtttttatcaaccagatcaaccaggaacaggtggttatcagtgccgccggaaaccactttgtagccgcgctcgaggaacacttctaccatcgctttagcgtttttagcgacctgctgctggtaagttttgaactcaggctccatcgcttctttcagagcaaccgctttaccggcgattacgtgcatcaacggaccgccctgaccaccagggaaaacggcagagttcagttttttgtacagctcttcgctaccacctttcgccaggatcaggccgccgcgcggacccgccagggttttgtgagtggtggtagtaacaacgtgagcatgaggaaccgggttcgggtagacgccagcagcaaccaggcccgcaacgtgcgccatatcaacgaacaggtaagcaccgatgctgtcagcgatttcacgcattttcgcccagtccaccacgccggaatatgcagagaaaccaccgataatcattttcggcttgtgttctttggcttgtttttccagatcggcgtagtcgatatgaccggtagcatcgataccgtaaggaacgatgttgtacagtttaccggagaagttaaccggagaaccgtgagtcaggtgaccgccatgcgccaggttcatacccagaacggtatcacctggttccagcagcgcggtgtagaccgcaaagttagcctgggagccggagtgcggctggacgttagcgtagtcagcgccgaacagttctttcgcacgatcgatcgccagttgttcaacgatatcaacatactcgcaaccgccgtagtagcgtttgcccggataaccttcagcatatttgttggtcagctgagaaccctgcgcctgcattacgcgcgggctggtgtagttttcggaggcgatcagttcgatgtgctcttcctgacgtactttttcctgctccatagcctgccacagttcggcatcataatcggcaatgttcatttcacgctttaacatccgcatctcctgactcagctaacaataaaatttttggcctttataggcggtcctgttggacaacggcgaacagtataaccgaatcattgtgcgataacaggtcttgacaaaggaatttacgcaaacgattaccttcaggctacgcaaggctttggagaataaagagcttgcaaccggaaacggatttcttttcaggtttgtgatgcaaatttttcacttcatcacattctttctgaaaaacaccaaagaaccatttacattgcagggctattttttataagatgcatttgagatacatcaattaagatgcaaaaaaaggaagaccatatgcttgacgctcaaaccatcgctacagtaaaagccaccatccctttactggtggaaacggggccaaagttaaccgcccatttctacgaccgtatgtttactcataacccagaactcaaagaaatttttaacatgagtaaccagcgtaatggcgatcaacgtgaagccctgtttaacgctattgccgcctacgccagtaatattgaaaacctgcctgcgctgctgccagcggtagaaaaaatcgcgcagaagcacaccagcttccagatcaaaccggaacagtacaacatcgtcggtgaacacctgttggcaacgctggacgaaatgttcagcccggggcaggaagtgctggacgcgtggggtaaagcctatggtgtactggctaatgtatttatcaatcgcgaggcggaaatctataacgaaaacgccagcaaagccggtggttgggaaggtactcgcgatttccgcattgtggctaaaacaccgcgcagcgcgcttatcaccagcttcgaactggagccggtcgacggtggcgcagtggcagaataccgtccggggcaatatctcggcgtctggctgaagccggaaggtttcccacatcaggaaattcgtcagtactctttgactcgcaaaccggatggcaaaggctatcgtattgcggtgaaacgcgaagagggtgggcaggtatccaactggttgcacaatcacgccaatgttggcgatgtcgtgaaactggtcgctccggcaggtgatttctttatggctgtcgcagatgacacaccagtgacgttaatctctgccggtgttggtcaaacgccaatgctggcaatgctcgacacgctggcaaaagcaggccacacagcacaagtgaactggttccatgcggcagaaaatggcgatgttcacgcctttgccgatgaagttaaggaactggggcagagtctgccgcgctttaccgcgcacacctggtatcgtcagccgagcgaagccgatcgcgctaaaggtcagtttgatagcgaaggtctgatggatttgagcaaactggaaggtgcgttcagcgatccgacaatgcagttctatctctgcggcccggttggcttcatgcagtttaccgcgaaacagttagtggatctgggcgtgaagcaggaaaacattcattacgaatgctttggcccgcataaggtgctgtaatttgatgttgccggatggaaacatccggcaacccttgacgcggtttaaattgccgcgtcgtcctcttcaccggtacggatgcgaatgacccgtgccacgtcaaagacgaagattttaccgtcaccgattttgccggtttgcgccgtgcgaataatggtatcgacacaggtatcgacaatgtcgtccggtacgacaatctcaattttcactttcggcagaaaatccaccatatactccgcgccgcggtacagctcggtatggcctttctggcgaccaaagcctttcacttcggtcaccgtcatgccggtaataccgacttcggccagtgcttcgcggacatcgtccagcttgaagggttttataatcgcatcaatctttttcatgctattccttgaaaaggtcgcctgtcttttgatctgctaaacgtaacacataacgccaattcattccttgaaatcgtttgcatccagctcgtgtcgggaaagcagtttataaaattctgtccggttgcgccccgccattctcgccgcgtgggtgacgttgcctttggtgatttgcagcagcttacgcaaatagttgagttcaaactgattacgtgcctcaacaaaggttggcagcgccgtattttcaccctccagcgcctgctccaccagcgcatcactaatcaccggagaactggtcagcgccacgcactgttcaatcacgttgaccaactggcgcacattacccggccagctcgcggtcatcaggcgtttcatcgcatcggtagagaacgcgcggacaaacggtttatgtcgctctgccgcctggcgcaacaggtgatttgccagtagcggaatgtcttctgtgcgctccgccagtgccggaattttcaggctgacaacgttgaggcggtaatagagatcttcgcggaattccccgcgcgccatcgcttttggcagatcacggtgagtggcagaaataatccgcacattgatatcaatatcgcggttactgcccagcgggcgcactttacgctcctgcaacacgcgcagcagtttgacctgtaacggcgcaggcatatcgccaatttcatcgagaaatagcgttccgccttccgccgcctggaataaaccttcgcgattgctgacagcgccagtaaacgcgccacgcgcatgaccaaacagctcgctctccagcaattgctcgggcaatgcgccacagttaatagcaataaatggtttgctgttgcgcgggctggcgttgtggatagcctgggcgaaaatctctttcccggtgccgctctgaccgttaatcaaaacgctgacgtcactttgcgccaccagccgcgcctgttccagcaaacgcagcatcagcgggctgcgggtgacaattgcctcgcgccagcgttcatcggtggctggcgcggattgctccagcgcatcgtcaattgcctgatatagcgcgtctttgtcgacaggcttggtgaggaaactaaaaacgccctgctgtgttgcagcaacggcatcgggaatagaaccatgcgcggtaagaataattaccggcattcccggctgcactttctggatttcagcaaacagctgcataccgtccatttcatccatccgcaggtcgctgatgactaaatctactttttcgcgattcagtacccgtaatccttcagcgccactttccgccgtgaccacactgtagccttcgctggtcaggcgcaggccaagcagtttcagcaatcccggatcgtcatcgaccaataataaatgcgcaggtttatggctcatcaggagtgacctcatgggtggatggcgcgggcttttcactctcgtgcggcgtatccgggctgaaatttccagccggtttgcgggtgctgagctggcgttcaatatcggtcaggttttccagcttgcgggtggtgagttccagttgctgctgtagaacgtgatgttgctggcgcaatgtatccagctcgctgtcgctggactgctggagtttactgtaacgttggcgctcttccgccagttgcagttgcagcgcctgaccatcgcgccagagttgatacagtgggcgaacctgtgccgggatctcggtacttaacgcttcaatacgcgcgaccagctggcggcgctcatacggcgtaattttggcgtcggcgagcaaaatcccttgtttaaaggtattttgccagctgccgtcgtcatattggcgagcttgctgacggctctgcgcaggcattaaacgatcagcacaatccatcgcccgcagccagtaaagcggattggtttcggtacttttaccttgcagcgcccagatgtcgctacattcagtagaaagatagtcagccagttgataaaccggaattttttcttctgctggcgtatcaatggctggcttattgtgattctgcacgcaacccagcaatgccagacatggcagccctgccagccacagccgtcggggcaataatcgttgaaaaatgtgtcgcatattcaccagacttaaagcctatcccagtgggcgtaattgttgcagacagtctggacatggacagcgcggagaaaccggagcgtacatatcgtacgtgaagatttcgagcactgcccggggccgaactgacaaataaaatagcctgataggataggctgttagcattatttcgtgtttttgctgctcggtaattcaatgcggaaacaaacgtcttgcccgctctcgtcgaccagatacagttccccttgcatacggcgaatacaatccctggcaatgcttaatcccagaccgctgcccttcaccgccccttttcgctggtggcttccctgaaaaaagggttcgaagatcatggcgcgttcctcttgcggaatgggcgtgcctgtattgatgacatcaatataaacccgcgcaccatgtaaactgctgcgaaggcaaatgttaccggattcagccccgtagtgcaccgcattggagtaaagattatccagtacgctcatcagcagcattggctccgccaggcaagctgttgctttgagatcgacgtcggtatgcatcattttagcccgtgcgggcaggctatgagcagaaaccactgtctccaccagcggtgctaactcaacattctccagttccaccgcactgtccgcctgtttacggttgtaatcaagcagttgttcgatcagtttttgcaaattgcggctgctgctatcaagaatgctcaccacctctttttgctctggcgtaagcggcccgacaacctggtcagccagtaattcagtgccctcgcgcatactcgccagtggcgtttttaattcatgagataaatgtcttaaaaattgatggcgttgggattccagccaactcaggcgctcacttaaccaaagaatacgttgcccaacgctgcgtaactcgctcggtccactgaagctgacgctattgcccagagaacgcccttcccccagacggttgatcatgcgctcgatatttttcaccggcccgataatcatccgcgtgaaaagcagtaccattaccagactcaccagaaatagcaccaggctttgccaaccaaaatattgcccacgttcggcgatttcacgctgaagctgctgcccacgagagaacaccactgtgcgcgtggcctgtaccatttcggtattggcactggcaaaggcttcaagacgtgcggcggcggcagcatcgggaccgctgttgttacactgaagttgagccagattgtgcaaatcctgacgtaatgcctggtagagtttatcgtccggcagcacgcctgcgtgggcatcgagcatttcgctgtaacgcttgcgctggctttgataaaccttcgccagggttgggtcgtccagcacgcaatactgacggtaactacgctccatctccagcgccgcgttggtcatcgcttcactgcgccgggcatcaataagcgtagtgcggttaaccagcgccgcctgatcgctaagcgcattcaggctttgccaggcttgccatgccagcaccaacaggggcagcagaatcagcaaaaatgccagcattaccagttgtcgtaaactgcggggaaaaacgggccagcgtttcaaggtgttactctcgtcagacgcgaatagcctgatgctaaccgaggggaagttcagatacaacaaagccgggaattacccggctttgttatggaataaggcggtgcctaactcgacgtttcgcccgatggttgatatagctacgctgatatcagaagttggacggcaggcaccttgttgtgcgtcattcgtattttatgtagcacgtcccgaaggggctgacataagtcggtgaatgagccactggttactattatgcagtaactgtgccaataaagaaaatagtttggtaacgtactgattatacgttgctttgaggggtttatgtctcctccgctgtttgaatgtaaatcagccactgtgtcgctaaaaagagacaacttaagataaacttattagataatattaaaatcaatgagttaagtgtcgccagaaagcgacacggcaaaccacccattgtcgtgatttacagacacaaaaaagctcccggagttgggagcttatgatagtggttggtgcttaatgccgcatccgggctgcaaaaccaatgggctgacgacttaccccaactgcttacgcgcattgcggaaaatgcgcatccatgggccatcctcgccccagttttccggatgccaggagttgctgacagtacggaaaacacgttccgggtgcggcatcataatggtgactcgaccactttcagtcgtgactgccgtaataccgttcggactaccgttcgggttagccgggtaggtttcagtgactttgccgaagttatcgacatagcgcagtgccaccagccctttgctttccagtgccgccagatgcgccgcatcacgcacttccacgcgcccttcaccatgagagacagcaatcggcatttggctgcccaccatcccctgcaacagcagagacgggctttgggttacttcaaccaggctgaaacgcgcttcaaagcgatcggaggtattgcgcacaaaacgtggccacaactcactacctgggatcagttcacgcagattagacatcatctggcaaccgttacatacccccagcgccagcgtttgcggacggtggaagaaggttgcaaactcatcgcgtacacggtcattgaacaggatactcttcgcccaaccttcaccggcacccagcacatcaccgtaggagaaaccaccgcacgcgaccagggcgtggaaatcttccaggcccgtgcgtccggtcagcaggtcactcatatgcacgtcgatagcatcaaagcctgcacggtggaaagctgccgccatttcaacatggctgttcacgccctgctcacgcagtacggcaactttcggacgtgcgccagtggcaatatacggtgctgccacatcttcgttgatatcgaagctcagttttacattcaggcccggatcggcgtcgttagatttcgcctgatgctcctgatcggcacactccgggttgtcacgcaggcgctgcatctgccaggtagtttctgcccaccagacacgcaacgtggtgcggctttcgctgaatacagtctgcccgttggcggtaatcacaaaacggtcaccggaaaccgcctgccctacataatggacacaatcagcaagcccatgctgtgccagtacggactcgaccgcttcacggtcagcggcacgaacctgaatcaccgcacccagttcttcgttaaacaacgccgccaggcgatcgtcacccagagtggcgatatccgcgtcaatgccacaatgaccagcaaaggccatttccgccagcgttaccagcaggccgccatcagagcggtcgtgatacgccagcagcttacgctgtgcaaccagcgcctgaatcgcgtcatagaagcctttcagttgcgcgacatcgcgtacatctgccggtttgtcgccaagctgacgataaacctgcgccagcgccgttgcgcccagcgcgttattgcctttgcccaaatcaatcagcagcagtgcgttatcttcggtagaaagctgcggcgtgatggtgtgacgtacatcttccacgcgggcaaatgcagaaatcaccaggctcagcgggctcgtcatttcgcgctcttcgttaccttcctgccagcgggttttcatgctcatggagtctttacccaccgggatcgtcaggcccagcgccggacaaagctcttcgcccacggctttaacggcttcatacaggcccgcatcttcaccagggtggcctgccgccgccatccagttggcggaaagtttgatgcgtttgatatcgccaatttgtgttgcggcgatgttggttaacgcttcaccgaccgccagacgggcagaggcggcgaaatccagcagcgcaaccggcgcacgctcgccaatcgccatcgcttcaccgtagtagctgtcgaggctggcggtagtgaccgcgcagttagcgaccggcacctgccacggccccaccatctgatcgcgcgctaccatgccggttacgctgcggtcgccaatggtcaccaggaaggttttttccgccacagtcggcagatgcagcacacgtttcaccgcgtctgcaatggtgatcccttcacgggccagcgcgtcgcctttcgctttcagcgtttgtacatcgcgggtcatcttcggcgttttaccaagcaggacgtccagcggcagatcgatcggctgattatcaaaatgacgatcgtgcagagaaagatgcagttcttcggtcgcttcaccaatcaccgcgtagggtgcgcgctcacgcttacacagttcgtcaaacagcggtaattgatcggcagcaaccgccagcacgtagcgttcctgggattcgttacaccagatttccagcgggctcatgcccggttcgtcgcttagaatctcgcgcagttcaaatttaccgccgcgcccgccgtcgctcaccagttccggcatggcgttagaaagaccgccagcgccaacgtcgtggataaacaggattgggttggcatcaccaagctgccagcaacggtcgatcacttcctggcagcgacgctccatctccgggttgtcgcgctgtacggaagcaaagtcgaggtcggcatcagactgaccagacgccatagaagacgctgcaccaccgccaagaccgatgttcattgccgggccgccgagaacgaccagcttcgcaccgacgttgatctcgcctttttgtacgtgatcggcgcgaatgttgccgatcccgcccgccagcatgatcggtttgtgataaccgcgcagctcttcgccgttgtggctgttcactttttcttcataagtacggaagtagccgttcagtgccggacgaccaaattcgttgttaaacgccgcgccgcccagcgggccttcggtcatgatgtccagcgcggtgacaatgcgctcaggcttaccgaaatcttcttcccacggctgttcgaagccaggaattcgcaggttggaaacggagaaaccaaccagacccgctttcggctttgcgccgcgcccggtggcaccttcatcgcggatttcaccgccggaaccggtcgccgcgcccggccacggagaaatcgccgtcgggtggttgtgagtttcgactttcatcagaatatgcgccggttcctgatggaaatcgtagcggcccgtttcgtggtcagcaaagtagcggcccacttcagaaccttccattacggcggcgttatctttataagcagagagaacgtgatctggcgtggtttcgaaagtatttttgatcatcttgaacaggcttttcggctgctgttcaccatcgataacccagtcggcgttaaaaattttgtggcggcagtgctcggagttcgcctgggcaaacatatacagttcgatgtcgttcgggttacgaccaagctttgtgaaagcatcctgcagatagtcaatttcatcttccgccagagccaagccaagacgcaggttagcgtcgatcagcgcctgacggccctgccccagcaaatcaacgctggtaaccggagtcggttgatggtgggcaaacaactgctctgcatcatctaaagcaaaaaagaccgtttccatcatgcggtcgtgcagttcagcggtaacctgctgccattgttcattggtcagcgtaccggcttctatatagtaagcaacgccgcgctcaaggcggtttacctgttgtagcccgcagttatgggcaatatcggtcgctttgctagaccagggagagatggtgccaggacgcggggtcaccagcaggagtttgccttgcggggcgtggctggcgagtgccgggccatatttcagcaggcgttcaagttgtgcgtgctcatcatcgtttaacggcgcattgaggtcagcaaaatggacatactcggcgtaaatattgtgaaccgggagcctggcagcctgaaaacgtgccagcagtttgttgattcggaatgcgctcagtgcagggctaccacgcagaatttccatcataagtctctcgtcttctaagctttcggtgtacccaagggggggaaacgggcgtcattataaagaatctgatgcgctgacgaaaccgtttgcgtggaaataaaatcaccatcgtgaattagcaacgcgtgccgccaatggctgtaataagttgccatctggcgcaggtttacgcaaaatgccgctcatttatgagtaaacctttcactattattacgttttttcaagctgggacgcgcacgacacagagaattaactaattgaaaaaattaaagattaattatctgttcatcggcattctggcactgctgctcgcggtcgctctctggccatccattccctggtttggtaaagccgacaaccgtatcgccgccattcaagcgcggggagagttgcgtgtgagcaccattcatactcccctgacttataacgaaatcaacgggaaaccttttggcctggattacgaactggcgaaacagtttgccgattacctcggcgtaaaactgaaagtgaccgtgcggcagaatatcagccagctgtttgacgaccttgataatggtaacgccgacctgctggcggcaggacttgtctataacagtgagcgggtaaaaaattatcagcctggccctacctattattccgtgagtcaacaactggtttataaagtgggtcagtatcgcccacgtacgctgggcaacctgacggcggagcaactcaccgttgcaccgggtcatgtggtggttaacgatctccagaccctgaaagaaacaaaattcccggaattaagctggaaggtagacgacaaaaaaggctctgcggaattaatggaagatgtcatcgaaggaaaactcgattacaccattgctgattctgtcgccatcagcctgtttcagcgcgttcacccggagctcgccgtagcgctcgatatcaccgatgaacaaccggtgacttggtttagcccgttagatggcgataataccctttccgccgccctgctcgacttcttcaacgaaatgaatgaagacggtacgctggcacgcattgaagagaaatacctggggcatggcgatgattttgattacgtcgatacgcgcacatttttacgcgccgtcgatgcggtactgccgcagttaaagcccctgtttgagaaatacgccgaagaaattgactggcgtttgctggccgctattgcttatcaggaaagccactgggatgcacaggccactagtccgacgggtgtgcgcggcatgatgatgttaaccaaaaataccgcgcaaagcctcggcattacggatcgtaccgatgccgaacagagcatcagcggtggcgtgcgttatttgcaggatatgatgagtaaagtgccggaaagtgtgccggagaacgagcggatctggtttgccctcgctgcgtacaatatgggctatgcgcatatgctggatgcccgcgccctgacggcaaaaaccaaagggaatcctgacagttgggctgacgtaaaacagcgtctgcctttacttagccagaaaccctattacagcaagctgacttacggctacgctcgtggacatgaagcctacgcttatgtcgaaaatattcgtaagtatcagattagcctggtgggttatctgcaagagaaagagaagcaggctacagaagcggcgatgcaactggcgcaggattatccggcggtaagccctacggagttgggcaaagagaaatttccttttctcagctttctttcccagagcagtagtaactatttgacccattctccctctctgctgttttccaggaaagggagtgaagagaaacaaaattaatccgtgctggattgcgcttttttctgcgctttaatttcctggcggcgcatgcgaaagaagtcactgagcaacgccgcgcactcatccgccagtattccttccgtaatttccactcggtgattcatacccggatgatgcagcacatccattaaagatcccgcagcgccagttttcgcgtcacgcgcaccaaagaccacgcgaccaatgcgactgtggatcatcgctccggcacacattacacatggttcaagcgtgacatacaacgtggcgtcgatcagacgataattttgcatcaccagaccaccctgccgcagggccatgatttctgcatgtgcggtgggatcatggcgaccaatcgggcggttccagccttcgccgattacccgattgttatgcactaataccgcgccgaccggcacttcccgctcatcccaggcacgtttcgccagcgtcagcgcgtgacgcatccagtattcgtggctaaattcgacttcagacaaaaagaaaactccggttataaaagcgcggcgcattatacacggacgctatgctttactttattccagttgctggagttcaccgcgcggggttactcgccaacgatgctgacagaaataaagcagcggattgtcctgattactgtcgctatagccactgtacagccgcagcggagtgccgattttgcgctccagttgtgcgaccttttcatgtcccagacaacgcatcgtcaatacccaaccaccatagccacgctgaatttggctggcgataagattaacccgcggcagccagggcgtatcgaaataaaccgcttcaaccagcggctgcggagagccggtaatcaaccagatatcagcatcggaacttaacaggtaggtggttaatcgctcctgaaccagcggaaaggcggtaacattgtcgcgaaaccagcgcacgaaatcggcctgcaacgtctgtaaacgtgcttcgctgtgaccaaaagtgcacccccacagaagcagactcatcggccagcgtgccgcacgaccttttatcaataacgcaatggctataatcggtaacaacggcaggacaagtaacgcattcagcggttggcgacgtagtaaatagcgcagaaaactgccgaacatatcctgctgatgcaatgttccatctaagtcaaaaaacaccacacgacgctcgtgagttgccaaaccatattcctctggactgaaacatcctgattaattttcgctactacatagcctaacagatagatcatcacttttccggcaacaatcgaccgcatcatggctaactggaatttttaattcatggcaattagcggcaatggaatataaaattcactcgcgtgtgtctcatattgcctgttgtcgccactatttcatcgcgaggaaagatatgaacggcttacttcgtatccgtcagcgttaccaggggcttgcccagagtgataaaaaactggcggattatctgctgctacaacctgatacggcgcgccatttaagctctcagcaactggccaacgaagccggagtcagtcagtccagcgtcgtgaagttcgcgcaaaaactcggctataaaggttttccggcgcttaagttggcgttgagtgaagcgctggcaagccagccggaaagtccctccgtgcccattcataaccaaatccgcggtgatgatccgttacggctggtcggcgaaaaactgattaaagaaaatactgccgctatgtacgcaacgctaaacgttaatagtgaagagaaactgcatgaatgcgtaacaatgttgcgctctgcgcggcggataattctgaccggtattggcgctagcggtctggtggcgcaaaactttgcctggaagctgatgaagattggcttcaatgctgccgcagtgcgcgatatgcatgcgctactcgcaacagtacaggcgagctcccctgacgatctgttattagccatttcctacaccggtgtacgacgcgagttaaacctggcggcagatgagatgctgcgagtgggcggaaaagtgctggcgattaccggctttactccgaatgccctgcaacagcgtgcttctcattgcctgtataccattgccgaagaacaagcgacaaacagtgctagtatctctgcttgtcacgctcagggaatgttaacggatttgctgttcattgcgctgattcagcaggatctggaactggcaccagaacgtattcgtcatagtgaagcgctggtgaaaaaactggtctgagtaaagaatgcgcgtataatgcccgcccggtttgtgttgttttgagagtttccttatggcgttgttaatcactaaaaaatgcatcaattgtgatatgtgtgaacccgaatgcccgaatgaggcgattagtatgggagatcatatctacgagattaacagcgataagtgtaccgaatgcgtagggcactacgagacaccaacctgccagaaggtgtgcccgatccccaatactattgtgaaagatccggcgcatgtcgagacagaagaacagttgtgggataaatttgtgctgatgcaccacgcggataaaatttaatattctactctggaagtagagtattaattatattactgggaagccttaacgccattatatttatttaattgatgacattagcataatcattcactaagttaatttatatagtatctgcccagacacttatttatagttattaaaggtgcgtccgactggttcaccggacgcaccttaagtacgtttccttgtgttataagaacagaaggatcagctgtaaaacagcaatgatgattttgatgacccgtttaatcaggtatcggcaatcagtcattcgtttttccttaaacaaggaatgcagccattcagattagcccttacatctccccaaaactgaacgtgcgagttattgagggtgcatgctgcactccacaccagagctttgacgacaccactcgtttcaatgggggaattctgtggcatggtgtaaagcacagcaaaatcttcaataacgaagccaattttaatgtacttacgaattggcggtcacgttaatctttccatcaatattgctttcttcgtaaaggctcgagtttttatgctaaagattgcaagttgcttgtaaaagataagtacactgatccataatcgctgttgttgagggtgcatgctgcacaaaattaaagttaaaaagtaaaacccccgttccttaccagttcgggggttttactttttaaagagaacggtattatttttaactttcaataattaccgtggcacaagcatagtgccgctcatctgccagcgttacatgcatatttgcaacgcccagcttttccgccagttttaatgcctcgccccatagccgtagccgtggtttgccgagctcatcattgaatacttcaaattgattaaacgccagaccattgcggatcccggtgccaaacgcttttgctgcggcttctttcacagcaaaacgcttcgccagaaaacgcaccggctggtggtgcgttttccagatagcccattcgttatcgcttaatacgcggcgtgccaggcgatcaccggatcgggcgatcaccgcttcgatgcgagcgatctccacaatatccgtgcctaaacctaatattgccattagccacgcgcttccagcatcagacgcttcatttctgccaccgcatctttcagtccggtcatcactgcacgaccaataatggcatgaccgatattcagttcatgcatctcagggatggcggcaatggctttcacgttgtgataggtcagaccgtgtccggcgttaactttcagaccgaggcttgcggcaaaggtcgcggctttggcgatacgcgccagctcttgcgcctgttcggcgtcagttttggcatcagcatagcaaccggtgtggatctcgataaacggtgcgccaacctctgccgcagctttgatctgctcttcatcggcgtcaataaacagagaaacctgaatcccggcatctgccagacgtttgcaggcatcgcgcattttgtcacgctgccctgcgacatccaggccgccttcggttgttacttcctgacgcttttccggtaccaggcagcaaaaatgtggcttcgtctcaacggcgatcgccagcatctcttcggtcaccgccatctccagattcatgcgggtatccagcgtctgacgcaggatgcgcacgtcgcggtcagtaatgtgacggcgatcttcacgtaaatgcacggtaatgccgtccgctcccgcctgctcggcaataaacgcggcctgcaccggatccgggtaagcggtaccgcgcgcgttgcgcagcgtagcgatatggtcaatgttgacgcctaacagtaattcagccatgacaatcctcatcattcataatgtgttttcaccgttcgcttaggcataaactgccggaacagttccctgctctttaaaggtttaccgccaagatacggcttaagcgccatgcgggtaaagcgtttcgcggcgcgcagtgtgtctgcgtcaggaaattcccgtgcgtttaacgcttttaactgccttccggtgaacgttttattgtcgataacgacgcttgcgataaaccctttttcttcgcgataacgatacgtcatggtgtcatctaccggctcgccgctacccgcacaatgggtaaaattgacgccataacccagatgcccgagcagtgccagttcaaagcggcgcagcgcgggttctggcgtaccagtgacccctgcaagagactgaatgcagtgcaagtaatcgaaaaaaagttcagagaagcgcgtctcgtattccagtacgcgggagagaagttcgttgatgtacagaccgctgtaaagcgtgataccgcttaatggcagcgccaggctgacggcttcagcactgcgcagcgttttgacttcgccacgcccgccaaaacgtagcaagagaggggtgaaaggctgtaatgcacctttcagggtagagcgtttagagcgtgcgcctttggcaaccagacgcacgcgcccgctttcctccgtgaagacgtccagcatcaggctggtttcgctccacgggcgactatgcaggacaaatgcgcgctgccagccttccatcggagttactcttaaagatcgtcaacgtaaccgagactgcgcagtgcgcgttcgtcgtcggcccaaccggatttcacttttacccacagttcaaggtgaacaggcgcttcgaacatttcctgcatgtctttacgcgcttcaatcccgatggttttgatcttggcccctttgttgccaatgaccatcttcttctgcccttcacgctcaacgagaatcaaaccgttgatgtcataaccaccgcgttcgttagagacgaaacgttcgatctccacggtcacggagtacggcagttcagcgccgaggaaacgcatcagtttttcgcggatgatttcagacgccataaaacgctgactgcgatcggtgatgtaatcttccgggaagtgatgagtcgcttcaggtagatgcttacgcacgattgccgcaatagtgtcaacattcagcccggtttcggcagagattggcacgatatcgaggaagttcatctggcttgccaggaactgcaggtgcggcagcagatcggctttctcctgcacgttgtccactttgttcaccgcgaggattaccggcgctttgccttcgcgcagtttgttgagcaccatttcgtcgtccggcgtccagcgggtgccttcaacgacaaaaatcaccagctcaacatcgccaatagagctgctcgccgctttgttcatcaggcggttaatggcgcgtttttcttccatatgcaggcccggtgtatcgacgtagatcgcctgatacgcgccttcagtatggatccccacaatgcggtgacgagttgtctgcgccttgcgggaagtgatggagattttctgccccagcagtttgttcaacaatgtggatttgccaacgttcggacgtccgacgatggcaataaatccgcagtaacttttatcgatgctcattccagctccagttttttcaacgcctgttcggcggcagcctgctcagccttacgacggctactacctgtgccaaccaccggttcactcaggccgctgacctggcagtggatagtaaattcctgatcgtgcgcttcgccacgtacctggactaccagataagtcggcagcggcagatggcgaccctgcaaatattcttgcaagcgcgttttcggatctttttgtttatcgcctgggctaatttcgtccaaacgagtttgataccagttgaggattaatttctcgacggtttgaatatcactgtcgaggaatacgccaccaattaatgcttcgacggtgtcggcgagaatactctcacgacgaaatccaccgcttttaagttcacctggccctaaacgtaagcactcgcctaactcaaattcgcgcgccagttccgccagcgtattgccacggaccagcgtggcgcgcatccggctcatatcgccttcatccacacgagggaaacggtgataaagcgcattggcgataacgtagctcagaatagagtcgcctaaaaattctaaacgctcgttatgtttactgctggcactacgatgagttaatgcctgctgcaacagttcctgatgattaaaagtgtagcccagcttccgttgaagccgattaattacgatggggttcatgcgataccaataaataaatgcgtcaacaattcagcacacgaaacagacctgatatacatggttctgctaactgcttcgctgcagtttcagtttaccggtatatggggaccaacgctgtttcgtgtgccgtggcaacctggaggtgccaaccttaaacttcgggggaatattctatacacaacgacgggggatgtcgttagccacgggagatttatctcataaataattcacgttgtcgccataacggcgacaacgtgaacgaagatggctattaatggatgccgccaatgcgacttaagcgcagaccagtcggccattcgccttcttgcttatcgaagctcatccagatagccgttgcccgaccgaccagattcgcttccggcacaaagccccagtaacggctgtccgcgctgttgtcgcggttgtcgcccatcatgaagtattgtcccggaggaacaatccaggttgccagttgttgccctggctgctggtaatacatccccacctgatcctgcgcaatcggcactgtcagaatgcggtgcgtcacatcacccagtgtctctttacgctcggaaagacgaattccattttctttggtttcgtttttcggcacttcaaagaatccgctggtcgcttccccaccattacggcgactgaaggtctgaacgaaatcgctcggttccacgttactgtaggtgaccggcagcgcgttttcacacgcctggccggaactgcatcccggttgaatcgtcagctctttactgaccggatcgtaagtgactttatcgcccggtaaacccaccgcgcgcttgatgtaatcaagctttggatcttccggatatttaaagaccacgatatcgccgcgtttcggatgaccggtttcgatcagcgttttctggtagataggatctttaatgccataagcaaacttctctaccagaataaaatcaccaattaacagagtcggcatcatgctaccactcgggatctggaacggttcataaataaagctacgcacaatcaatacgatagccagtaccggaaaaacagaagcaccggtttccagccagccaggcttcggcgcaacctttttcaacgttgctttatccagactgtccccggcagccgcctgcgccgctgcctgacgttcccgccgtttaggtgcgaaaaagaatttatccacgcaccataaaatgcccgtcaccagtgtggcaatcaccagaatcagggcaaacatattcgccatgccaactcctaagggttatttgttgtctttgccgacgtgcagaatggcgaggaacgcttcctgcggcagctcgacgttaccgatctgcttcatgcgtttcttaccttctttctgcttctgcagcagctttttcttacggctgatatcgccgccataacatttagccagtacgtttttacgcagctgtttcacggtggatcgcgcaatgatgtgcgtaccaatcgctgcctgaatggcgatatcaaactgctggcgtgggatcagatctttcatcttctccaccaactcgcgaccgcggttttggctattatcacggtgggtgatcaacgccagcgcatcaacacgttcaccgttgattaatacgtctacacgtaccatgtcggacgcctggaagcgcttgaagttgtaatccagagacgcataaccacggctggtagatttcaggcgatcgaagaagtcgagcaccacttccgccatcgggatctcgtacgtcagcgccacctgattaccgtggtaaaccatattggtctgcacgccgcgtttttctacgcacaacgtaataacgttgccgagatatgcctgcggcagcagcatgtgacactctgcaatcggctcgcgcagttcgtagatgttatttaccgcaggcagcttggatgggctgtcgacgtagataacttctctactcgtggtttcaacttcatacactacggtcggcgcagtggtgatcagatccagatcgtattcacgttccagacgttcctggatgatctccatgtgcagcaggccgaggaagccgcagcggaaaccaaagcccagcgcgctggagctttccggctcatagaacagactggcatcgttcaggctgagtttacccagcgcgtcacggaaggcttcatagtcgtcggaacttaccgggaacagaccggcgtatacctgcggtttgactttcttaaagccaggcagcgccttttctgccggattacgcgccagcgttaaggtatcgccgactggagcgccgtggatatctttaatcgcacatacgagccagcctacttcgccacatttcagttcagtgcggtcaacctgtttcggcgtgaagatgcccagacggtcggcgttataggtctgcccggtactcatgactttcactttgtcgcccttacgcagggtgccgtttttaatacggataagactaacaacgcccaggtagttgtcgaaccaactgtcgataattagtgcctgcaacgggccttccggatcgccttccggcggcggaatgtcgcgcaccagacgttcgagaacgtcctgcacaccaacgccggttttcgcactacagcgcaccgcgtcggtggcgtcgatgccgacgatatcttcaatttcttccgccacgcgttcaggatcggctgccggcaggtcaatcttgttcagtaccggcacaacttcgagatccatttccatggcggtgtagcagtttgccagggtttgcgcttctacgccctgcccggcgtcgaccaccagcaatgcaccttcacaggcagccaggctacgggaaacttcataggagaagtctacgtggcccggggtgtcgataaagttaagctgataggtttcgccgtcagacgctttgtagtccagcgtcacgctttgcgctttgatggtaatgccacgctcacgctcaagatccatggaatcgagaacctgcgcctccatttcacggtcagacaggccaccgcagatctggataatacggtcagacagcgtgcttttaccgtggtcaatgtgagctatgatgctaaagttacgtatattcttcataaagtatgattattgtgccttaatgcccggttaaccaggcttttagaagtcgctgttctgagcttaacgtctgtattaatagaaacgccgcattctacactacaacattgaggcgaggaaatgttcataccgtatggattgtggtatctggaaacgtcctcgcatttgttatgcaaaatgcaacaaagccagtgaaatcactggctcgcgtcttcgctagatgtttcaaatcgcacaaggccaggcggcaatgccacgcttaagatgatcggttgccattctgcccgggcagcaaacttacggctgtagccgcgcgcaatcaggaacccgccaataccaccgaggatcgcaccacataatgctgcgacgtcagaagcaaagagtagctgaaataggctagcgataaggaataatcccaccagcgggctcatataaaccagtaatgcggagctaagcaggctgccttcggcgatccccaattccactttttgccccggcactaacggctcatcacagggtacgacaatggtatgcgtggtttgcgggccaagtttatttaacacgcggctaccgcaaccggcgcgactagcgcagctgctgcaactagctttaacatcacaactgaccagcgcctgcccgttttgccaggagacgacggtagcccactctttgatcattgcgctgccccgaacttaatattctcggcaatgcgtttcgccgtttgcggcggcagttcaccgacaatggtgatttcggcgttatcacgtacgcttgtactgacggttctgcgtccggtgcgcaacatctgatcggtgctgcttggcgtagcgcggttaacgtttacgctgaagctgaataatccgtcggaatagagacgactttcgataggcatgttgtccatcgtcggtagcggacgtcgactactggaaacttcgctaaaaccctgtggcaaccaggttggcgtccagctgaatttagctttttcacctacaggaacagaaagcaacggcggcaaatttgccttcgccagcgtctgcatactgctgctgatatcctgattgacgttaaaagcaatcacgcgaaattgttccagcgtttcaccatcgcgatcaaggagatcaacccgcatcggtaatttgctttcggtgtccatccacacgatgtagctgtagcgtgtaccatctcgggcaaccacgcgaatgacttcgcaaagacgatcagcaatacgcgtgcgcccgacggagataaagtcgtagtaaggagaaaggcgtttgaaatcggtatagataaggcttggcagagaatcaacaatgtaatcgccattaagcgtgaacggttcaagtcccggttcaaaatagctgatttcattgccgcgctgtaccacttcccggcgcgggccatccatttgcaacaattgtgcaagaggacggttatcgaggcgtgcatgtcgataacgcagagactcaacaccctgtttattgatgctgatgaaactcagctcgtaattcagactctgactggccaggttcatctgctgtaataacgccccggacgcgggagtggcgctggcgttagcagagaataacaggctacctgtcactaaactcatggcaaaccaaagttgcttcattactggctttgcgttcctaaagtttgaattcctggcacctgtacagcggcttgctgggtttgcgcctgctcaaactgaagctgttcagagtggagtcggcgttgcagttcgtaatcctgcaacattgcattaatgcgacgacgctgctcctgtacctgctgctgttgaccattgtttgcggtcgcttcagaaggtactcccaggcttaccgggctggctttacccatcatcggcagtgtattaaataccggcgtttcgggctgctgggacgtttcagattgtccattatagtgctggacgccaacgataactgcaaggcttacgcatgcggctacgcccatttgggtaagctgtgccgcccacggacgtactttctgccagaatggcattttctgccattgatgcggcgcaggctgggcttccgggatcaatgtcgccggttgacgtactggctcttcttcaatggcggccatcacgcgactagagatatcgaaatggagcacctcgggagtatcaccccgcatactgtcacggattaagtgatagctttcccaggttttctgcatttctgggttatgagccagttcgttaagcagctcactatccagcgtttcgccatccattaaagcggaaagttgttctttctgcatgcctaatacccttatccagtatcccgctatcgtcaacgcctgataagcggttgaactttgttatcaatagcttccctcgctcggaagatacgactacgcaccgtacctaccggacaatccatgatagcggctatctcttcatagctcaggccatccagctcccgcaaggttattgccatgcgtaaatcttccgggagggactcaatagttcggaaaactatctgtctcagttcttcactcaacattaagttctcagggttgctaatttctttcaacgcgccgccactttcgaagttttcagcttcaatggcatccacatcactggaaggtggacgacgcccctgagcaaccaggtaatttttcgctgtatttacagcaatccgatacagccatgtataaaaagcgctatctccccggaagctatccagcgcacgataggctttaataaaagcttcttgtaccacatcgggaacatcaccgctcggcacatagcgggaaaccagactcgccactttatgctgatagcgcactaccagtaagttaaaggctttctgatctcccttctggacccgttcaaccaggacctggtccgttaactgctcgctcatccgaggtaaagtctccccaaaccaaatttccacgcgctatcgaaacgccactccattagctgcaatttgagcaagcaaagggttagagtgtctcgtttttgtaaagttccgtaacgcatctgtttttgtttgtcatgctgtagacggatcattatctatcattataagtctacagaatctgaacatcgcattatctgtgtagaaatgcccatttaactgcctgaagagtaacccaacggcctttttatttcaccacctaatcctccaccagccagtaacttctctttttctcgccgccctgcgtcagcgtgtttagcaactgtaacaaatattaaaatagcaggtgtttatccgcacaacatgatgctatgctgaccaaaccatgtttagtaaattaaacaaagaaaatgaatactctccctgaacatagttgtgacgtgttgattatcggtagcggcgcagccggacttagtctggcgctacgcctggctgaccagcatcaggtcatcgttctaagtaaaggcccggtaacggaaggtagtacattttatgcccagggcggtattgccgccgtgtttgatgaaactgacagcattgacagccatgtggaagacacattgattgccggggctggtatttgcgatcgccatgcagttgaatttgtcgccagcaatgcacgatcctgtgtgcaatggctaatcgaccagggggtgttgtttgatacccacattcaaccgaatggcgaagaaagttaccatctgacccgtgaaggtggacatagtcaccgtcgtattcttcatgccgccgacgccaccggtagagaagtagaaaccacgctggtgagcaaggcgctgaaccatccgaatattcgcgtgctggagcgcagcaacgcggttgatctgattgtttctgacaaaattggcctgccgggcacgcgacgggttgttggcgcgtgggtatggaaccgtaataaagaaacggtggaaacctgccacgcaaaagcggtggtgctggcaaccggcggtgcgagcaaggtttatcagtacaccaccaatccggatatttcttctggcgatggcattgctatggcgtggcgcgcaggctgccgggttgccaatctcgaatttaatcagttccaccctaccgcgctatatcacccacaggcacgcaatttcctgttaacagaagcactgcgcggcgaaggcgcttatctcaagcgcccggatggtacgcgttttatgcccgattttgatgagcgcggcgaactggccccgcgcgatattgtcgcccgcgccattgaccatgaaatgaaacgcctcggcgcagattgtatgttccttgatatcagccataagcccgccgattttattcgccagcatttcccgatgatttatgaaaagctgctcgggctggggattgatctcacacaagaaccggtaccgattgtgcctgctgcacattatacctgcggtggtgtaatggttgatgatcatgggcgtacggacgtcgagggcttgtatgccattggcgaggtgagttataccggcttacacggcgctaaccgcatggccagcaatagtttgctggagtgtctggtctatggctggagcgcggcggaagatatcaccagacgtatgccttatgcccacgacatcagtacgttaccgccgtgggatgaaagccgcgttgagaaccctgacgaacgggtagtaattcagcataactggcacgagctacgtctgtttatgtgggattacgttggcattgtgcgcacaacgaagcgcctggaacgcgccctgcggcggataaccatgctccaacaagaaatagacgaatattacgcccatttccgcgtcagtaataatttgctggagctgcgtaatctggtacaggttgccgagttgattgttcgctgtgcaatgatgcgtaaagagagtcgggggttgcatttcacgctggattatccggaactgctcacccattccggtccgagcatcctttcccccggcaatcattacataaacagataaaaagcctgggtcagcgccgtatacgcttcggaatagttctggtctggcccacgaatgactaagcgatcgctaaagcattctcccgcctgcggggagaatgccagcagcacccgatgcggcagtcgcgcttcgttttccgccacatccgtccgcaaacgtaaatgccagcccatgcttaatgccagctccgtaaaaccattaccaatctgctctggcagcactacgcagaaaaatccctcttcggtaatgcactccgccgcacaggtcagcaagcttgggtgatcaagcgtagtggtatagcgagcctgttcccgttgaggtgtgctgcactctactccctgctgatagtaaggtgggttactgatgattaaatcgaagcgtactgtctgctgtgtaatccactgctgaatatccgccgtatggacgttaatccgctctgcccacggggactggttgatattttcctgcgcctgcgcggcagcttcactttccagttcaactgcatcaatcatcacgctgtcatcggttcgctgcgccagcattaatgccagcaacccgctacccgcgccgatatcaaggcaacgttttaccccagccaccggtgcccatgcgcccaataaaataccatccgttcccactttcatcgcacagcgatcgtgagcaacaaaaaactgtttaaaagtaaatccattacgacgaagcacggatgtagactgactcatgaaaataaaaccttgcaggaaaaacggcgatagcaccgggtgagaacaatacccgagaagcgatatccatacaaacagatgaagattgcagccgtaacgtctataatcagcgccccacacagaggtagaacatgactgtaacgactttttccgaacttgaactcgacgaaagcctgctggaagccctccaggataaaggtttcactcgcccgaccgccattcaggctgccgccattccgcctgcgctcgatggccgtgatgtactcggttctgcgccgacaggcaccggtaaaacggcggcgtatctgctgccagcgttgcagcacctgctcgatttcccgcgtaagaaatccggtccgccgcgtattttgatcctcaccccaactcgcgagctggcgatgcaggtgtccgatcatgcccgcgaactggcgaaacatacgcatctggatatcgccaccatcaccggcggcgtagcctatatgaaccacgcggaagtgttcagcgaaaatcaggacatcgtggtcgccacgaccggacgtctgctgcaatacataaaagaagagaacttcgattgccgcgcggttgaaacgctgatcctcgacgaagcagaccgtatgctggatatgggcttcgctcaggatatcgaacatattgctggcgaaacgcgctggcgtaaacagaccctgctctttagcgcaacgctggaaggcgatgcgattcaggactttgccgagcgtctgctggaagatccggtggaagtttctgccaatccctccacccgtgagcgcaaaaaaattcatcagtggtattaccgcgccgatgatcttgagcataaaaccgcgttgctggtgcatctgttaaaacagccggaagcgacccgcagtattgtgtttgtgcgtaagcgtgagcgtgtgcatgagctggcaaactggctgcgcgaagcgggcatcaacaactgctatctcgaaggtgagatggtacagggcaagcgtaacgaagcgatcaagcgtttgaccgaaggtcgcgtaaacgtactggtcgcaaccgatgttgccgcgcgcggtatcgacattcctgacgtcagccacgtctttaacttcgatatgccgcgcagtggcgatacttatttgcaccgtatcggacgtaccgcgcgcgccggtcgtaaaggcaccgcaattagcctggtggaagcccatgaccatctgctgctgggtaaagtaggccgctatattgaagagccaattaaagctcgcgttattgatgagttacgcccgaaaacgcgtgcgccaagcgaaaagcagaccggcaagccaagcaagaaagtactggctaaacgtgctgagaagaaaaaagctaaagagaaagagaagccgcgggtgaaaaaacgccatcgcgacaccaaaaatattggtaagcgccgtaaaccaagcggaacgggcgtgccaccgcaaacgacagaagagtaatctcaatgccaggtttaagcctggtattaaaagtgctggcaaacgcaaaactgcctgatgcgctacgcttatcaggcctacgtggctcatgcaatatattgaatttgcacgatcttgtaggccggataaggcgttcacgccgcatccggcatgaataaagcgcactttgtcgacaagttaaatgccgggtttaatcccgacattatttttatccagccacaaaactctcttcaacacactgaataaaagtgtgcatcgccgggctaaccgcttttccagcatgatgtgcgcacatggccgtaatggtctggctctgttcgccaaaaggcaattcaattaattctccgcactccaactcttttgccaccgcaaagcgcggtaggtagctgaccccgatattcgccgcgacacaacgcttgatgctttcgatacttataagctcaatggtgttttccaccgtgatccgccgctgacgcagcgtgctctcaaatatctgccggaagacacattgcggttcgttgataataaagctacaggcgttatgtcttcccggctcagtaaaatcgacatctgcaatttgcggactagccaccagcaccagactttgttcacccaactctcgtcgattcagagcatcatcattccctacacgataaaagacgccaacatcggcctcatcattcagtagcgcatcacggatcacgtaacagttcaggctctgcaagcttaaacgcacttttggggcgcgttgccgaaaacgctgcaacacctgcggcattcggtaagagagcaacgtttcgccgctaacaacgcgtagttccccgtccggatcactctcctttttggcagcctcacgaagcgtatccatcactcgggtaagttcataaatgtgcggcagcaacttttttccttcgcgggtaaggcacatccgtcggccaattttctcaaataactggacactaaactcctgctcaagctgctgaatatgaaaagtcaccgtgctttgtgtacagcacaatttttggctagctcgcaaaaaggaaccctcttccaccacggttttaagcgtaataaaacggcgcagatccataaccccaaacctatcgaaaatatcgaatctagaatataaaaacattcatttttttaaatgttccgtgtcgggtactgtctaccaaaacagaggagataacaagtgacaccgacccttttaagtgctttttggacttacaccctgattaccgctatgacgccaggaccgaacaatattctcgcccttagctctgctacgagccatggatttcgtcaaagtacccgcgtgctggcagggatgagtctgggatttttgattgtgatgttactgtgtgcgggcattagttttagtctggcagtgattgacccggcagcggtacaccttttgagttgggcgggggcggcatatattgtctggctggcgtggaaaatcgccaccagcccaacaaaggaagacggacttcaggcaaaaccaatcagcttttgggccagctttgctttgcagtttgtgaacgtcaaaatcattttgtacggtgttacggcactgagcacgtttgttctgccgcaaacacaggcgttaagctgggtagttggcgtcagcgttttgctggcgatgattgggacgtttggcaatgtgtgctgggcgctggcggggcatctgtttcagcgattgtttcgccagtatggtcgccagttaaatatcgtgcttgccctgttgctggtctattgcgcggtacgcattttctattaacgaaaaaaagcggaagaggtcgccctcttccgcttagtaacttgctacttaagccttacaggctttcagtaaaggtacgagcgataacgtcgcgctgctgttccggagtcagagagttaaagcgaactgcataaccggatacacggatggtcagctgcggatatttttccggatgcttaactgcatcttccagagtttcgcgacgcagaacgttaacgttcaggtgttgaccaccttcaacgcgaacttctggtttcacttctactggaacttcacggtattcaatgtcacccagtttgcttactgcaaccacttcatcttctgcataacctgcttttgcaacgatgcaacgcgcttcgcctttttcgctgtccagcagccagaaagagttcagcagatcgtcgttagcggctttagtaatctggatacctgtaatcatgtgatgcctccccggcaaaattatttgatttgttcagcctgtcgcggccaattggtaaaaccattgttgcttgagtgtatatatactcctcaaacacccttgaatctttgatttaaatcaataaaaaccacacatcaagtatggtcgcaaatggattttattgttttacatcaacttatgcgggtgtgaaattttaccaatttacatttttttgcactcgtttaagtctaaaaaatgagcatgattttgttctgtagaaagaagcagttaagctaggcggattgaagattcgcaggagagcgagatggctaacgaattaacctggcatgacgtgctggctgaagagaagcagcaaccctattttcttaatacccttcagaccgtcgccagcgagcggcagtccggcgtcactatctacccaccacaaaaagatgtctttaacgcgttccgctttacagagttgggtgacgttaaagtggtgattctcggccaggatccttatcacggaccgggacaggcgcatggtctggcattttccgttcgtcccggcattgccattcctccgagtttattgaatatgtataaagagctggaaaatactattccgggcttcacccgccctaatcatggttatcttgaaagctgggcgcgtcagggcgttctgctactcaatactgtgttgacggtacgcgcaggtcaggcgcattcccacgccagcctcggctgggaaaccttcaccgataaagtgatcagcctgattaaccagcatcgcgaaggcgtggtgtttttgttgtggggaagccatgcgcaaaagaaaggggcgattatagataagcaacgccatcatgtactgaaagcaccgcatccgagcccgcttagcgcgcatcgtggattctttggctgcaaccattttgtgctggcaaatcagtggctggaacaacgtggcgagacgccgattgactggatgccagtattaccggcagagagtgagtaaatttgcggggaaatgccggatggcagagttgccacccggctgatttatcaggctttattctgacgccaccattcaccaagcaaaacgccggttgcgacagagatattcagcccggcaacgttgcccgtaccgtcaatcttcacgcgcagatcgttcggatcgcgtgcggcatccggtaacccttcatattcctgacccagcaccagtaccattttcgctggcagactagttttgaacagcggtttaccctgctcgctggaagtggtcactacggtgtaacctgcctgacggaaatcatccagcacgttaacaatgttgtcgccagtaatcggctgaacgtgctctgcgccgccttctgcggtacggatagccgccccgctctccagcagtgccgcatcctgcaccacgacacctttcacgccgaagtgcgcgcagctgcgcatcatgccacccaggttatgcgggttagattcgttttccagtgccagaacgcaatcctgcgcgcctgcctggcttacccactgctgcacggttgtaccgttacgctttttgatcaagaagcaaacgccgccgtgatgttccgtgccactcgcttttgtcaattccgcttcatccaccacatggtacgctttgcggtttgctgccatccagcgcaaagcttctttaaaacgcggcgttacactctggataaaccaggcgcgaacaatcgcttccggacggctctggaaaagtgcctgacatgcattttcgccgtagacgcgggtttcttccgcacgctgacgacgcaacacttccggatcaataaaacttttaccactgatgccaccgtgatcggccttttccggcgtctcatcacccggcgcgcgggaaaccgtgcgccacgggctatcttcccacttgcggtcacggggctgactctgtttgtcatcgcgggcggggcgacggccaccgtcagcacgagattttcctggacgcccgccccctttcccggtacgcgggttgtgggtacgtttatcagaatcatcatcactgcggacatacatcactttgaccttgccgcttttacctttcatttcatcgttcatgcttttctccaccagcgctgcgcgaagcgcgcagattacccgaagtccgcgcggttcgccatgatttcgtaccaaagcctgcgactatcatacctattgaataaaacagattgttgtctggaacaatgtccccgataatatgtaacatattagaaacataccggcgtcgttgccgataagtctccttactcatcccgaggttagttatgaataccgtttgtacccattgtcaggccatcaatcgcattcccgacgatcggatcgaagatgcggcaaaatgcggacgctgcggtcacgacttgtttgacggagaggtgattaatgcgaccggtgaaacactcgacaaattgctgaaggatgatctacctgtggtgatcgacttctgggcaccgtggtgcggcccctgccgtaatttcgcaccaatttttgaagatgtcgcgcaagagcgtagcggtaaagtgcgctttgtgaaagtgaataccgaagctgaacgtgaattgagcagtcgctttggaattcgtagtataccgacgatcatgattttcaaaaacggtcaggttgtcgacatgcttaatggcgcagtaccgaaagcgccgttcgatagctggctgaacgaatctctttaatcttaccggggcgcatcttgtgccccgttttctcctctgcgacaatggcgttttttcgacgctctcttatgaccgaaaacgctgttctccagttacgcgccgagcgtattgcgcgcgcaacacgtccttttcttgcccgcggtaatcgcgttcgtcgctgccaacgctgtcttttgccagagaaattatgtctctgtagcacaattaccccagcacaagcaaaaagtcgcttctgtttgctgatgttcgacaccgagccaatgaagcccagtaataccgggcgtctcattgctgatattttgcctgataccgttgcgtttcaatggagccgtaccgaacccagccaggatttgctggagttggtgcaaaacccggactatcagccaatggtggtctttcccgctagctatgctgatgagcaacgggaagtgatcttcacaccacctgccggtaagccaccgctgtttatcatgctcgatggtacctggccggaagctcgcaagatgtttcgtaaaagtccgtatctggataatcttcccgtcatttccgtcgatctttcccggctttctgcctatcgcctgcgtgaagcccaggctgaaggccaatattgtactgccgaggtagccatcgcactgttagatatggccggcgataccggggcggcggcagggttaggcgagcattttacccgctttaaaacacgctatctggcaggaaaaacgcaacatctgggtagcatcacagcagaacagttagaaagcgtttaaaatcattcggtcacttctgcgggagaccggtatgagtcagcgaggactggaagcactactgcgaccaaaaagcatagcggtaattggcgcgagcatgaaacccaatcgcgcaggttacctgatgatgcgtaacctgctggcgggaggctttaacggaccggtactcccggtgacgccagcctggaaagcggtgttgggtgtgttggcctggccggatattgccagcttgccctttacacccgaccttgcggttttatgtaccaatgccagccgtaatcttgctcttctggaagagctcggcgagaaaggctgtaaaacctgcattattctttccgccccggcaagccaacacgaagatctccgcgcctgcgccctgcgccataacatgcgcctgcttggaccaaacagtctgggtttactggctccctggcaaggtctgaatgccagctttagccctgtgccgattaaacgcggcaagctggcgtttattagccaaagcgctgccgtctccaacaccatcctcgactgggcgcaacagcgtaagatgggcttttcctactttattgcgctcggcgacagcctggatatcgacgttgatgaattgcttgactatctggcacgcgacagtaaaaccagcgccatcctgctctatctcgaacagttaagcgacgcgcgacgctttgttagcgcggcccgtagtgccagccgtaataaaccgattctggtgattaaaagcggacgtagcccggcggcacagcgactgctcaacacgacggcaggaatggacccggcatgggatgcggctattcagcgtgccggtttgttgcgggtacaggacacccacgagctgtttagcgcggtggaaacccttagccatatgcgcccgctacgtggcgaccggctgatgattatcagcaacggtgctgcgcctgccgcgctggcgctggatgccttatggagtcgcaatggcaagctggcaacgctaagcgaagaaacctgccagaaactgcgcgatgcactgccagaacatgtggcaatatctaacccgctcgatctacgcgatgacgccagcagtgagcactatattaaaacgctggatattctgctccacagccaggattttgacgcgctgatggttattcatagccccagcgccgctgctcccgcaacagaaagcgcgcaagtattaattgaagcggtaaagcatcatccccgcagcaaatatgtctctttgctgacgaactggtgcggcgagcactccagccaagaggcacgacgtttattcagcgaagccgggctgccgacctaccgtaccccggaaggaaccatcactgcttttatgcatatggtggagtaccggcgtaatcagaagcaactacgcgaaacgccggcgttgcccagcaatctgacttccaataccgcagaagcgcatcttctgttgcaacaggcgattgccgaaggggctacgagcctcgatacccatgaagttcagcccatcctgcaagcgtatggcatgaacacgctccctacctggattgccagcgatagcaccgaagcggtgcatattgccgaacagattggttatccggtggcgctgaaattgcgtagcccggatattccacataaaagcgaagttcagggcgtcatgctttacctgcgtacagccaatgaagtccagcaagcggcgaacgctattttcgatcgcgtaaaaatggcctggccacaggcgcgggtccacggcctgttggtgcaaagtatggctaaccgtgctggcgctcaggagttgcgggttgtggttgagcacgatccggttttcgggccgttgatcatgctgggtgaaggcggtgtggagtggcgtcctgaagatcaagccgtcgtcgcactgccgccgctgaacatgaacctggcccgctatctggttattcaggggatcaaaagtaaaaagattcgtgcgcgcagtgcgctacgcccattggatgttgcaggcttgagccagcttctggtgcaggtttccaacttgattgtcgattgcccggaaattcagcgtctggatattcatcctttgctggcttctggcagtgaatttaccgcgctggatgtcacgctggatatcagcccgtttgaaggcgataacgagagtcggctggcagtgcgcccttatccgcatcagctggaagaatgggtagaattgaaaaacggtgaacgctgcttgttccgcccgattttgccagaagatgagccacaacttcagcaattcattagccgagtcaccaaagaagatctttattaccgctactttagcgagatcaacgaatttacccatgaagatttagccaacatgacacagatcgactacgatcgggaaatggcgtttgtagcggtacgacgtattgatcaaacggaagagatcctcggcgtcacgcgtgcgatttccgatcctgataacatcgatgccgaatttgctgtactggttcgcagcgatctcaaagggttaggcttaggtcgacgcttaatggaaaagttgattacctatacgcgagatcacggactacaacgtctgaatggtattacgatgccaaacaatcgtggcatggtggcgctagcccgcaagctcgggtttaacgttgatatccagctcgaagaggggatcgttgggcttacgctaaatcttgcccagcgcgaggaaagttgagtaaggtactggaaatgttgaccacttaatcgggactggtgttattattgcccgcttatgtcgtctgcattgcacagaggacccttcaatgaacagagaagaaatgcactgtgatgttgagtaaatttaagcgtaataaacatcaacaacaccttgcccaactacccaagatttctcaaagtgttgatgatgtcgatttcttttacgctcccgccgacttccgggagacgctgctggaaaaaatagccagcgcgaagcagcgcatttgcattgtcgccctgtatctcgaacaggatgacggtggcaaaggcattctgaacgcgttgtatgaggctaaaaggcagcgtccggaactggatgtgcgggtgctggtcgactggcatcgtgcacaacgtggacgcattggcgctgcggcatctaacactaacgctgactggtactgccgcatggcgcaggaaaatccgggcgtagatgttccggtttatggcgttccaatcaatactcgtgaagcccttggtgttctgcactttaaaggctttatcatcgacgatagcgtactttatagcggtgccagcctgaacgatgtttacctgcatcagcacgataaatatcgctacgaccgttatcatctgatccgtaaccgtaagatgagtgacattatgtttgaatgggttacacagaatattatgaatggccgcggcgttaatcgtctggatgatgttaatcggccaaaaagcccggaaatcaagaacgatattcgtctgttccgccaggagctgcgtgatgccgcttatcatttccagggcgatgccgacaacgatcagctttctgtaacgccgctagtggggctggggaaaagcagtctgttgaacaagaccattttccatcttatgccttgtgccgagcagaaactaaccatctgtacgccatacttcaacctgccagcaatccttgtgcgcaatattatccagttgctgcgcgaagggaaaaaggtcgaaattattgttggtgataaaaccgcgaatgacttctacattccggaagatgaacctttcaagataattggcgcattgccttatctctatgagatcaatctgcgtcgtttcctgagccgtttgcagtattacgtcaatactgaccagctagtggttcggttatggaaagatgacgacaacacctatcacctgaaagggatgtgggttgatgataagtggatgttgatcaccggtaataacctgaacccgcgcgcctggcgtctggatctggaaaacgccattttgatccacgatccgcaacttgagctggcgccacagcgagagaaagaactggagctgatccgcgagcataccaccatcgttaagcactatcgcgatctgcaaagtattgccgattatccggtgaaggttcgtaaactcatccgccgtttgcgccgtatccgcatcgaccgattaattagccgcatcctgtaatcacaaccccgtcctgtacggggtttgttttttggaggccacgttttgcgtattctttttgtctgttcgctattgttactttctggatgcagccatatggctaacgatagctggagcgggcaggataaagctcaacactttatcgccagcgcgatgctttccgccgccggaaatgaatatagtcagcatcaggggatgagccgggatcgcagtgccatgtttggattgatgttctctgtcagtttgggggcgagtaaagagctttgggatagccgccccgaagggagcggctggagctggaaggatttggcctgggatgtcgccggtgcaagcaccggctataccgtctggcaactgacccgtcattaaagacgcatccccttccctttgcgatgtagcatcaaagaaaccagaaacgccaccacggccatcaaggtcacataccagaagaaggctgtttccattcctatacttttcaggctcaacgctacgtactccgcgctaccaccaaatatagcattagcgaccgcataactcagaccaacgcctaatgcgcgaacctgtgccgggaacatctcagccttcagtattccactgatacttgtataaaaactcactatcagcagggcacacatcaccagaccaaaagcggcataagggctggaaacgttttgcaatgcactgagaataggaacggtaaaaatggctgccaggctaccgaaacataacatactggtacggcgaccaatcttatcgctcagcgcgccaatgagtggttgaataagcatgaatacaaacaatgcggcagtcataatgccactcgccacgttggcatgcattcccgcagtatttaccagatacttctgcatataagtagtgaaggtatagaaacaaagggagcccgcagcggtaaaaccgagaaccatgatgaatgcacggcgattgcgccataatcctttcagagatccagcttcttttaaagcgcgcgtttcttgttggctagtttcatctaactgacgacgtaaccacaacgccacaacagctaacacagctcctaacgcgaaaggaatacgccatccccactctctgagtgcagcgtcttccatggtgtgttgtaaaaccacgacaaccagtagggctagcagttgtccgccgatcaacgtcacatactgaaaacttgcgtaaaaacctttgcgcccttcaacggcaacttcactcatataggtggcgctggtgccatattctccgccaacagataatccctgaaataaacgagcgagaagcaataatgccggagcccacgtacctatagtttcataacctgggaggcaggcgataaccaggcttccgaaacacatcatacacacgcttaacagcatgctttttttgcgaccatgtttatcggctatgcggccaaatagccaaccgcctattgggcgcatcaggaatcccgcagcaaaaacacctgctgtttgtagtagttgagtcgtcgtgttcccggaagggaagaagatgtgggcaaagtagagactacagaagctgtagacatagaaatcgaaccactcgaccagattaccactagaggcccccacaatcgcccaaatgcggcgacgagtatcactacttgtcagtttgctgtctgccgttacagtactttcagccatgccattatgtctcctgccgtaatccgatgcttttgtcggtcgcttttgtttattttttttgtaaaggaaatattatacatttgttgcatatcattatgcaaccttaaccatgaatttagttagcaggaaaatggttattgaggagcttaaggataaatttctggtaaggaggacacgtatggaagtgggcaagttggggaagccgtatccgttgctgaatctggcatatgtgggagtataagacgcgcagcgtcgcatcaggcatttttttctgcgccaatgcaaaaaggccatccgtcaggatggcctttcgcataatttgatgcctggcagttccctactctcgcatggggagaccccacactaccatcggcgctacggcgtttcacttctgagttcggcatggggtcaggtgggaccaccgcgctacggccgccaggcaaattctgttttatcagaccgcttctgcgttctgatttaatctgtatcaggctgaaaatcttctctcatccgccaaaacagcttcggcgttgtaaggttaagcctcacggttcattagtaccggttagctcaacgcatcgctgcgcttacacacccggcctatcaacgtcgtcgtcttcaacgttccttcaggacccttaaagggtcagggagaactcatctcggggcaagtttcgtgcttagatgctttcagcacttatctcttccgcatttagctaccgggcagtgccattggcatgacaacccgaacaccagtgatgcgtccactccggtcctctcgtactaggagcagcccccctcagttctccagcgcccacggcagatagggaccgaactgtctcacgacgttctaaacccagctcgcgtaccactttaaatggcgaacagccatacccttgggacctacttcagccccaggatgtgatgagccgacatcgaggtgccaaacaccgccgtcgatatgaactcttgggcggtatcagcctgttatccccggagtaccttttatccgttgagcgatggcccttccattcagaaccaccggatcactatgacctgctttcgcacctgctcgcgccgtcacgctcgcagtcaagctggcttatgccattgcactaacctcctgatgtccgaccaggattagccaaccttcgtgctcctccgttactctttaggaggagaccgccccagtcaaactacccaccagacactgtccgcaacccggattacgggtcaacgttagaacatcaaacattaaagggtggtatttcaaggtcggctccatgcagactggcgtccacacttcaaagcctcccacctatcctacacatcaaggctcaatgttcagtgtcaagctatagtaaaggttcacggggtctttccgtcttgccgcgggtacactgcatcttcacagcgagttcaatttcactgagtctcgggtggagacagcctggccatcattacgccattcgtgcaggtcggaacttacccgacaaggaatttcgctaccttaggaccgttatagttacggccgccgtttaccggggcttcgatcaagagcttcgcttgcgctaaccccatcaattaaccttccggcaccgggcaggcgtcacaccgtatacgtccactttcgtgtttgcacagtgctgtgtttttaataaacagttgcagccagctggtatcttcgactgatttcagctccatccgcgagggacctcacctacatatcagcgtgccttctcccgaagttacggcaccattttgcctagttccttcacccgagttctctcaagcgccttggtattctctacctgaccacctgtgtcggtttggggtacgatttgatgttacctgatgcttagaggcttttcctggaagcagggcatttgttgcttcagcaccgtagtgcctcgtcatcacgcctcagccttgattttccggatttgcctggaaaaccagcctacacgcttaaaccgggacaaccgtcgcccggccaacatagccttctccgtccccccttcgcagtaacaccaagtacaggaatattaacctgtttcccatcgactacgcctttcggcctcgccttaggggtcgactcaccctgccccgattaacgttggacaggaacccttggtcttccggcgagcgggcttttcacccgctttatcgttacttatgtcagcattcgcacttctgatacctccagcatgcctcacagcacaccttcgcaggcttacagaacgctcccctacccaacaacgcataagcgtcgctgccgcagcttcggtgcatggtttagccccgttacatcttccgcgcaggccgactcgaccagtgagctattacgctttctttaaatgatggctgcttctaagccaacatcctggctgtctgggccttcccacatcgtttcccacttaaccatgactttgggaccttagctggcggtctgggttgtttccctcttcacgacggacgttagcacccgccgtgtgtctcccgtgataacattctccggtattcgcagtttgcatcgggttggtaagtcgggatgacccccttgccgaaacagtgctctacccccggagatgaattcacgaggcgctacctaaatagctttcggggagaaccagctatctcccggtttgattggcctttcacccccagccacaagtcatccgctaatttttcaacattagtcggttcggtcctccagttagtgttacccaaccttcaacctgcccatggctagatcaccgggtttcgggtctataccctgcaacttaacgcccagttaagactcggtttcccttcggctcccctattcggttaaccttgctacagaatataagtcgctgacccattatacaaaaggtacgcagtcacacgcctaagcgtgctcccactgcttgtacgtacacggtttcaggttctttttcactcccctcgccggggttcttttcgcctttccctcacggtactggttcactatcggtcagtcaggagtatttagccttggaggatggtccccccatattcagacaggataccacgtgtcccgccctactcatcgagctcacagcatgtgcatttttgtgtacggggctgtcaccctgtatcgcgcgcctttccagacgcttccactaacacacacactgattcaggctctgggctgctccccgttcgctcgccgctactgggggaatctcggttgatttcttttcctcggggtacttagatgtttcagttcccccggttcgcctcattaacctatggattcagttaatgatagtgtgtcgaaacacactgggtttccccattcggaaatcgccggttataacggttcatatcaccttaccgacgcttatcgcagattagcacgtccttcatcgcctctgactgccagggcatccaccgtgtacgcttagtcgcttaacctcacaacccgaagatgtttcacttcagagttgcgaaaatttgagagactcacgaacaactttcattgttcagtgtttcaattttcagcttgatccagatttttaaagagcaaatatatcaaacaagacttaacagtctgttttgagatattgaggtcggcgactttcactcacaaaccagcaagtggcgtcccctaggggattcgaacccctgttaccgccgtgaaagggcggtgtcctgggcctctagacgaaggggacacgaaaattgcttatcacgcgttgcgtgatattttcgtgtagggtgagctttcattaatagaaagcgaacggccttattctcttcagcctcactcccaacgcgtaaacgccttgctattcacttttcatcagacaatctgtgtgagcactgcaaagtacgcttctttaaggtaaggaggtgatccaaccgcaggttcccctacggttaccttgttacgacttcaccccagtcatgaatcacaaagtggtaagcgccctcccgaaggttaagctacctacttcttttgcaacccactcccatggtgtgacgggcggtgtgtacaaggcccgggaacgtattcaccgtggcattctgatccacgattactagcgattccgacttcatggagtcgagttgcagactccaatccggactacgacgcactttatgaggtccgcttgctctcgcgaggtcgcttctctttgtatgcgccattgtagcacgtgtgtagccctggtcgtaagggccatgatgacttgacgtcatccccaccttcctccagtttatcactggcagtctcctttgagttcccggccggaccgctggcaacaaaggataagggttgcgctcgttgcgggacttaacccaacatttcacaacacgagctgacgacagccatgcagcacctgtctcacggttcccgaaggcacattctcatctctgaaaacttccgtggatgtcaagaccaggtaaggttcttcgcgttgcatcgaattaaaccacatgctccaccgcttgtgcgggcccccgtcaattcatttgagttttaaccttgcggccgtactccccaggcggtcgacttaacgcgttagctccggaagccacgcctcaagggcacaacctccaagtcgacatcgtttacggcgtggactaccagggtatctaatcctgtttgctccccacgctttcgcacctgagcgtcagtcttcgtccagggggccgccttcgccaccggtattcctccagatctctacgcatttcaccgctacacctggaattctacccccctctacgagactcaagcttgccagtatcagatgcagttcccaggttgagcccggggatttcacatctgacttaacaaaccgcctgcgtgcgctttacgcccagtaattccgattaacgcttgcaccctccgtattaccgcggctgctggcacggagttagccggtgcttcttctgcgggtaacgtcaatgagcaaaggtattaactttactcccttcctccccgctgaaagtactttacaacccgaaggccttcttcatacacgcggcatggctgcatcaggcttgcgcccattgtgcaatattccccactgctgcctcccgtaggagtctggaccgtgtctcagttccagtgtggctggtcatcctctcagaccagctagggatcgtcgccttggtgagccgttaccccaccaacaagctaatcccatctgggcacatccgatggcaagaggcccgaaggtccccctctttggtcttgcgacattatgcggtattagctaccgtttccagtagttatccccctccatcaggcagcttcccagacattactcacccgtccgccactcgtcagcgaagcagcaagctgcttcctgttaccgttcgacttgcatgtgttaggcctgccgccagcgttcaatctgagccatgatcaaactcttcaatttaaaagtttgatgctcaaagaattaaacttcgtaatgaattacgtgttcactcttgagacttggtattcatttttcgtcttgcgacgttaagaatccgtatcttcgagtgcccacacagattgtctgataaattgttaaagagcagtgccgcttcgctttttctcagcggcgcggggtgtgcataatacgccttcccgctacagagtcaagcatttctttgcttttctctgttgagattctcaggagaaccccgccgacccggcggcgtgtttgccgttgttccgtgtcagtggtggcgcattatagggagttattccggcctgacaagcgaaaaatataaaaactttatcgttcgctcacttttcaggcaaaacatcttaaatatagtcttttccgtctaacttatagacaaaaacgagccccgaagggctcgttttatcatttactggacggcgacaatccggtcttcattaacttccaggcgaatcactttacccggaaccaattcaccagacagtatttgctgtgccagcgggttttcgatctgctgctgaattgcacgtttcagaggacgtgcaccatagaccggatcgtaaccgttctcgctcagcagtttcagcgcctcgtcagaaatgtggatttcataaccacgttcttccagacgtttgtacagacgtttcaactgaatctgcgcaatgctggcaatgtgctgttcacccagcggatggaagaccaccacttcatcgatacggttaatgaattccggacggaagttatggcttaccacaccgagcaccagctctttcatgtgcgcataatccagttcaccgaagcgttcctgaatcagatcggaaccgaggttagaggtcataatgacgaccgtattacggaagtcgaccgttctcccttgcccgtcagtcagacgcccatcatccagtacctgcaacagaatgttgaagacatccggatgcgctttttccacttcatccagcaggatgacggaatacggacgacgacgcaccgcttcggtcaggtagccaccttcttcataaccgacatatcccggaggcgcaccaaccaaacgagacacgctgtgtttctccataaactcggacatatcgatacggaccatcgcctcgtcgctatcaaacataaagttcgccagcgccttacaaagctctgttttccccacaccagttgggccgaggaacaggaaactaccaatcgggcgatttggatccgccagccccgcacggctacgacgaatagcgttagataccgcatcaaccgcttcgttctgaccaattacgcgatggtgcagttcttgctccatacgcagcagtttttcgcgctcgctttccatcatgcgagaaaccggaatccccgtccaacgcgccagcacttcagcaatttcggcgtcggtcactttattacgcaacagacgcatagttttgccttcgagctgcgttgcggcttccagttgcttttccagttccgggattttgccgtattgcagttcagacatccgcgccaggtcccccacacggcgagcctgttcaatagcgattttcgcctgttccagttccgctttaatggtctgcgtaccagaaaggcttgccttctctgctttccactcttcttctaactcggagtactgacgttctttgtcgctcagttcttcgttgagcatatccagacgttttttactggcttcatcagactctttcattaacgcctgttgttccagtttgagctggatgatacgacgatcgagtcggtcgagttcttctggtttactgtcaatctgcatacgaatgctggatgctgcttcatcgatcaggtcgatggctttatccggcagctgacggtcagcaatgtagcgatgagacaacgtcgccgctgcaacaattgccgggtcagtaatttgcacatggtggtgcaattcgtaacgttctttcaggccacgcagaatcgcaatggtatcttcaacagaaggctcggcaacaaacactttctggaaacgacgttccagcgcagcatctttttcaatgtactggcgatattcgtcaagcgtcgtggcacctacgcagtgcaattcaccacgcgccagcgccggtttcagcatgtttccggcgtccattgcgccatcggctttacccgcgccgaccatggtatgtaattcgtcgataaataggatgacgttgccttcctgtttggcaagatcgttaagcacgccttttaaacgttcttcaaactcaccgcgatatttcgccccagccaccagcgcgcccatatccagcgccagtacccggcggcctttcaacccttccggcacttcgccgttgataatacgctgcgccagaccttcaacgatggcagttttaccgacgccgggttcaccaatcagtaccgggttatttttagtacgacgttgcagcacctgaatggtacggcgaatttcttcatcacgaccaatcaccggatcgagtttgccctgttcggctcgttcggtaaggtcgatggtatattttttcaaagcctgacgttggtcttcagcaccttgatcgttcacgctttcacctccacgcatttgttcaatcgcttgagtaatgttggcggtggtcgcccctgctgctttcaggatgtcggccagcgtgccgcgagactcaagtgccgccagaacgaacagttcactgctgataaagttatcaccacgtttttgcgccagcttgtcgcaaagattaagaacgcgcaccagatcctgacttggctggacatcaccaccagtaccttcaacctgcggtaaacgatttaatgcctgattgatatctgtgcgcaactggccagcatttatgccagcggatgttaataaaggactaacgctacccccttcctgattcagcagggcgctcattaaatgaagtggttcgataaattggttgtcgtgcccgagtgcaagactttgggcatcggcaagagcaagctggaatttattagtaagacgatccagacgcataactcctcccataacggatcaaagttgctactggagattaaatgaggtcatccctcaattattcaaggttattgaccagattaatgtgaaaagaaaatcacgcgtaccggatcgtcttgattctttaggttatatcagccaaatgaaacttgccatacgaccggtggtcttgtcgcgacgataagagaagaaagtctcattttccgtatatgtacaacggtcgccgccgaaaatttgctcaacacccacgttcgccagacgctgccgggcaagctgataaatatccgccagatacttatcaccatgctgaatgaaagctgcacttgctttagcgtctactgccataaacgcctcgcgaacctccccccccacttcgaacgcgcgtggaccaattgccggccctaaccaggcgagaatattttccggattatcagcaaaacaggaaaccgtctcttccagcacgcctgcgcacagtccacgccagccagcatgagcggcggcgacttccgttcccgctcgattgcaaaacagcacagggaggcagtcggcagtcatcactgcgcaaaccgtgccgggcgtattgctataagaggcatccgcccgtttactggcataaggttcgccagtgagcttaagcacatctttgccgtgtacctgctcaagccagaccggtttagaaggcaaattgcccgcagcaaaaagtcgcttgcgattctcctcaacgtgatccgggttatcgccacaatgggcaccgaggttgagactgtcatacgggggcaagctcacgccgccgatacgagtggagctacaggccgcaacaccttttggctgcggccactgcgggacaatcagcttactcataaccagtccacttcatccttatgttcttcgaaatcggcgcgcatcacctcaatcagctccaccatatcttgtggaataggcgcatgccattccatttcgatgccggagatcgggtgataaagacgcagcatggttgcatgtagcgcctggcggtcaaacttacgcagcgtggagataaatgcttcgctagcaccttttggcggacgcggacggccaccataaaccggatcgcccaccagcggatgagtgatatgggccatatgcacgcggatctggtgcgtacgtccagtttccagacgcaaccgcagacgcgtgtgcacacggaagtgttccatgatgcgatagtgagtcaccgctggtttgcccatcggatgcaccgccatatgggtacgtttggtcgggtggcgactgattggctcgtccaccgtgccacctgcggtcatatgaccaatcgccaccgcttcatactcacgagtaatttcacgccgttgcaaagattcgactaaacgcgtctgagccggaacggtttttgccacaaccatcaggccagtggtgtctttatccagacgatggacgatgcccgcacgcggtacatcggcaatgggtggatagtaatgaagcaacgcattcagtaccgtgccatccgggttacccgcgccaggatgtaccaccaggtcgcgcggtttattaatgataataatgtcttcatcttcatagacgatatccagcgggatatcctgcggttcaaaacgcgcttcttcttcaatctcagcgttgatggcaacctgctcgccacccaatactttttctttcggcttatcacaaactttgccgttaaccagcactcgctggtcgaggatccattcttttattcggctacgactataatccgggaacatttcggccaaagcctgatctaagcgttgaccgagttggttttcggacaccgttgcagtgagctgtactcgttgtgccatatatactgcttcttcgtttatcgttggggttttacggctttgccgtttaatatagtgtgctattgtagctggtcttaaccgggagcaggaacagagaatctcccgtattacattttgaggaaagtcaaaacgtcatgacgcgcatgaaatatctggtggcagccgccacactaagcctgtttttggcgggttgcagcgggagtaaggaagaagtacctgataatccgccaaatgaaatttacgcgactgcacaacaaaagctgcaggacggtaactggagacaggcaataacgcaactggaagcgttagataatcgctatccgtttggtccgtatagccagcaggtgcagctggatctcatctacgcctactataaaaacgccgatttgccgttagcacaggctgccatcgatcgttttattcgccttaacccgacccatccgaatatcgattatgtcatgtacatgcgtggcctgaccaatatggcgctggatgacagtgcgctgcaagggttctttggcgtcgatcgtagcgatcgcgatcctcaacatgcacgagctgcgtttagtgacttttccaaactggtgcgcggctatccgaacagtcagtacaccaccgatgccaccaaacgtctggtattcctgaaagatcgtctggcgaaatatgaatactccgtggccgagtactatacagaacgtggcgcatgggttgccgtcgttaaccgcgtagaaggcatgttgcgcgactacccggatacccaggctacgcgtgatgcgctgccgctgatggaaaatgcataccgtcagatgcagatgaatgcgcaagctgaaaaagtagcgaaaatcatcgccgcaaacagcagcaatacataacagaaacctgaaacacaaaacggcagcccttgagctgccgtttttttattctgtcagttgtgaaactgaagcgatttagtcgctatcgatctcatcaaatatggctcgctttgagatattcctcaagtaaaaaaacatctcttcctgcgatttctcacaaaaaagattcgttgacaaaaagtgacaaaattatgagattttcatcacacattttgacatcaggaacggtatgctgaattcaccaagacgggaagacaagaggtaaaatttatgacaatgaacattaccagcaaacaaatggaaattactccggccatccgccaacatgtcgcagaccgtctcgccaaactggaaaaatggcaaacacatctgattaatccacatatcattctgtccaaagagccacaagggtttgttgctgacgccacaatcaatacacctaacggcgttctggttgccagtggtaaacatgaagatatgtacaccgcaattaacgaattgatcaacaagctggaacggcagctcaataaactgcagcacaaaggcgaagcacgtcgtgccgcaacaagcgtgaaagacgccaacttcgtcgaagaagttgaagaagagtaatcctttatattgagtgtatcgccaacgcgccttcgggcgcgttttttgttgacagcgtgaaaacagtacgggtactgtactaaagtcacttaaggaaacaaacatgaaacacataccgtttttcttcgcattcttttttaccttcccctgaatgggaggcgtttcgtcgtgtgaaacagaatgcgaagacgaacaataaggcctcccaaatcggggggccttttttattgataacaaaaaggcaacactatgacaagcgaaaacccgttactggcgctgcgagagaaaatcagcgcgctggatgaaaaattattagcgttactggcagaacggcgcgaactggccgtcgaggtgggaaaagccaaactgctcagccatcgcccggtacgtgatattgatcgtgaacgcgatttgctggaaagattaattacgctcggtaaagcgcaccatctggacgcccattacattactcgcctgttccagctcatcattgaagattccgtattaactcagcaggctttgctccaacaacatctcaataaaattaatccgcacagtgcacgcatcgcttttctcggccccaaaggttcttattcccatcttgcggcgcgccagtatgctgcccgtcactttgagcaattcattgaaagtggctgcgccaaatttgccgatatttttaatcaggtggaaaccggccaggccgactatgccgtcgtaccgattgaaaataccagctccggtgccataaacgacgtttacgatctgctgcaacataccagcttgagcattgttggcgagatgacgttaactatcgaccattgtttgttggtctccggcactactgatttatccaccatcaatacggtctacagccatccgcagccattccagcaatgcagcaaattccttaatcgttatccgcactggaagattgaatataccgaaagtacgtctgcggcaatggaaaaggttgcacaggcaaaaagtccgcatgttgctgcgttgggaagcgaagctggcggcactttgtacggtttgcaggtactggagcgtattgaagcaaatcagcgacaaaacttcacccgatttgtggtgttggcgcgtaaagccattaacgtgtctgatcaggttccggcgaaaaccacgttgttaatggcgaccgggcaacaagccggtgcgctggttgaagcgttgctggtactgcgcaaccacaatctgattatgacccgtctggaaagtcgcccgattcacggtaatccatgggaagagatgttctatctggatattcaggccaatcttgaaagtgcggaaatgcaaaaagcattgaaagagttaggggaaatcacccgtagtatgaaggtattgggctgttacccaagtgagaacgtagtgcctgttgatccaacctgatgaaaaggtgccggatgatgtgaatcatccggcactggattattactggcgattgtcattcgcctgacgcaataacacgcggctttcactctgaaaacgctgtgcgtaatcgccgaaccagtgctccaccttgcggaaactgtcaataaacgcctgcttatcgccctgctccagcaactcaatcgcctcgccgaaacgcttatagtaacgtttgattaacgccagattacgctcactgctcataatgatgtcggcataaagctgcggatcctgagcaaacagtcgcccgaccatcgccagctcaaggcggtaaatcgggctagagagcgccagaagttgctcaagctgaacattttcttctgccaggtgcagcccgtaagcaaaagtagcaaagtggcgcagtgcctgaataaacgccatattctgatcgtgctcgacggcgctaatacgatgcagccgagcgccccagacctgaatttgctccagaaaccattggtatgcttccggtttacgtccatcacaccagaccacaacttgctttgccaggctaccgctgtccggaccgaacatcgggtgtagccccagcaccggaccatcatgcgccaccagcatggcctgtaatggcccatttttcacacttgccagatcgaccagaatacaatctttcggtaaaggcggtaatttgccaataacttgctcagtaacgtggattggcacactaacaatcaccattccggcatcggcaacaatatcagccgctcgatcccagtcatgttgctccagaatccgcacctgataaccgctgagggtcagcatcttctcgaacaggcgtcccatctgaccgccaccgccgacgataaccaccggacgcagactcggacaaagtgttttaaatcctttgtcgttttcactggagtaagattcacgcatcacccgacgcaaaacatcctcaatcagatctggcggtacacccagagcttccgcctctgcacgacggctggccaacatagatgcctcgcgctccggaacataaataggcagtccaaagcggcttttcacctcgcccacttcagcaaccagttccagacgcttcgctaataaattcagcagcgctttatcgacttcatcaatttgatcgcgtaatgcggtcaattcagcaaccataataaacctcttaagccacgcgagccgtcagctgcccgttcagatcctgatgaatttcacgcagcaaggcatcggtcatttcccagctaatgcaggcatcggttacggatacaccgtatttcatttcactgcgcggttgctcggaagactgattgccctcgtggatattactttcgatcatcagaccaataatactgcgattgccatctttgatttgagcaaccacggattctgccaccgcaggctgacggcgataatctttattggaattaccgtggctgcaatctaccatcagagacgggcgcagtcccgcctgttccatctctttttcacattgcgcaacatccgcagggctatagttcggcgctttaccaccgcgcaggatcacatggccgtccggattcccctgagtttgtagcaacgcaacctgccctgcctggttaatgccaacaaaacggtgcggctgggcggcggcgcgcatagcgttaattgctgttgccagactgccgtcggtgccgtttttaaaaccaaccggcatggaaagcccggaggccatttcacggtgagtttggctttccgttgtacgagcaccaattgcactccagctaaacagatcgcccaggtattgcgggctattcggatctaacgcttccgtcgccagtggcagtcccatattcaccagctcaagcagcaatttacgcgcgatctgcagcccggcttctacatcaaaagagccatccatatggggatcgttaattaaccctttccagccgacagtggtacggggtttttcaaaatagacgcgcattaccagatagaggctatcgctgacctctgcggcaagggctttaaatcgacgagcatattccagagcagtttccggatcatgaatggaacaaggaccacatactaccagcagacgaggatcgcgcccggcgataatatcactaatgcttttacggctgtcagcaatctgggcttcttgttgcaggctcaatggaaaagcggccttcagttgttccggagtcattaaaacctgttcgtcggtaatatgtacgttattcagcgcgtctttttgcatgatggcgatcctgtttatgctcgtttgcgatagttgatcctcagcgaggatgacgtaacgataacacataaagtaaagttttcaatccatatttcgtacatttttatttacacaggcaatttagtcgcgctttcaacccttacctctgtatagataaatttacactccctttgaaaacaatccgctatgctttgaaaaaggagaaagaaatgatgaaaaagtttatcgcccccttgttggctttactggttagcggatgtcagattgatccttatactcacgcgccaaccttgaccagcaccgactggtatgatgtcggtatggaagatgcgataagcggcagcgccataaaagatgacgatgcatttagcgatagtcaggcggatcgcggtctataccttaaaggatatgccgaaggacaaaagaaaacttgccagaccgattttacttatgcccgaggactttccggtaaaagctttcctgccagctgcaacaatgttgaaaatgccagccaactgcatgaagtaggcaaaaaggggctgatgaaaatgccagcacaatacgattaaattaattaaaaccccacaaataaattaaacataagattttactcattgtgttttatttctcacattgatgacggtcgcatgaaaaaatgatattttaatgagcattctgaaaaaatatcgatgcatttcgagcgaagatggtggggatccctgaatgcgtttttctcaccgactgttcttacttctgattctcctgctgacgggagcaccaatactcgctcaggagccttctgacgttgcgaaaaacgtgcgtatgatggtttccggtattgtcagttacacccgctggcctgcgctaagtgggccaccaaagttatgtatctttagttctagtcgttttagtaccgccctacaagagaatgccgcgacatctttgccttatctgcctgtcatcattcacactcaacaagaggcgatgattagtggctgcaatggtttttattttggcaacgagagtccgacattccagatggaattaaccgaacaatatccgagtaaggcgttattattaattgccgaacaaaataccgagtgcattattggtagcgccttttgtctgatcatccacaataatgacgtcagatttgccgtaaacctggatgccttaagccgtagcggtgtaaaggtcaacccggatgtcttaatgctcgcacggaagaaaaatgatggataacgataattctcttaataagcgccccacgtttaaaagagcattacgcaacatcagtatgaccagcatatttatcactatgatgctgatctggttgctgctttccgtgaccagcgtgctgaccctgaaacagtacgcgcaaaaaaacctggcactgacagcagcaacaatgacttacagtctggaagcagctgtcgtttttgccgatggccctgcagcaactgaaacactggcagcgctgggccagcaagggcaatttagtactgcagaagtacgtgataagcagcaaaatattctggcatcctggcattacacccgtaaggatccaggcgatactttcagtaatttcataagccactggctcttccctgcccccatcattcagccgattcgtcacaatggtgaaaccattggcgaagtacgcttaaccgctcgcgacagtagtatcagccattttatctggtttagcctcgccgtactgaccggttgtattctgctggcaagtggcatcgcaattaccctcacccgccatttgcacaatggcctggtagaagcgctgaaaaatatcaccgatgtcgtacatgatgtgcgttccaaccgcaatttttcccgacgagttagcgaagaacgtatcgctgagtttcaccgcttcgctctcgacttcaacagtctgctggatgaaatggaagagtggcagcttcgtttacaggctaaaaatgcgcagcttctacgtaccgcgctacatgacccattaaccgggctggctaaccgcgcagcgtttcgtagcggcatcaacacgttgatgaacaattccgatgcccgaaaaacgagcgcgttactatttcttgatggcgataatttcaaatacatcaatgatacctggggtcatgcgacgggcgatagagtcttgattgaaatcgcaaaacggttagctgaatttggcgggctgcgacataaagcataccgcctgggcggcgatgaattcgctatggtgctctatgatgtacagagcgaatctgaagtgcagcagatatgtagtgcactgacacaaatctttaatctcccgtttgatcttcataatggccatcagaccaccatgacattaagcattggttacgcgatgaccattgagcacgcctctgcggaaaaattacaagagcttgccgatcacaatatgtatcaggccaaacaccagcgtgccgaaaagctggtgagataacaaggatatatcgatatgataaagcacctggtagcacccctggttttcaccagtctaatactgactggctgccagtcccctcagggaaagtttactcctgagcaagtcgccgctatgcaatcttatggatttactgaatccgccggcgactggagcctgggcttaagtgatgccattctgttcgcaaaaaatgactacaaattgctcccggaaagccagcaacagatccaaaccatggcagctaaattggccagcacagggctaacacatgcccgtatggatggacacaccgataactatggtgaagacagttacaacgaaggcttaagtttgaaacgggcgaatgtcgtggccgatgcatgggctatgggtggacaaattccacgcagcaatctcaccacacagggtttaggaaaaaaatatcccatagccagtaacaagaccgcccagggccgcgccgagaaccgccgcgtcgcagtggtgattactaccccttaaaacaccagcaaacagataaaaaagggccagccaattggccagcccttcttaacaggatgtcgcttaagcgaaatcttagttaagacgctctttgatacgagcagccttaccagtacgctcacgcaggtagtacagtttagctttacgaacagcaccacgacgtttgacagaaatgctgtcaactaccggagagtgagtctggaagacacgctcaacgccttcgccgttggaaattttacgaacagtgaatgcagagtgcagaccgcggttacgaatagcgataaccacgccctcgaatgcctgcagacgttttttggaaccttcaacaacccatactttcacttccacggtatcacccggacggaaggaaggtacgtcctgcttcatctgctcttgttcaagttgcttaataatgttgctcataatttaatctcttatcctgggtaaactgatatctcgggggcttacgccatcccatcatgtttatgttgctgttgtgcgtgttccgttttgaactccgccagcaaccttgcttgctcttcagtcagagccaggttttccagaagttcaggtcttctaagccaggtacggcccaggctctgtttcaaacgccagcgacgtatctcggcatggttgccgctcagtaacactggcggaacttccatcccttctaacacctcaggccgcgtatagtgcgggcaatccagcaatccttcagcaaaggaatcttccgttgcgctggcttcatgtcccagtactcccggaataaaccgggaaacggagtcaatcagcgtcattgctggtaactcaccaccactgagaacgtaatcgccgatactccattcttcgtcaatttcggtttggatcacgcgctcatctataccttcgtagcgaccgcacaccagaatcaatttttgattcgttgccagttcgctgacgcccgcttgatcaagcttgcgtccctgtggactcagataaatcacctttgcgccttcacccgccgcggcttttgctgcatgaatggcgtcccgcaagggttgcaccatcattaacatccccggtccgccgccgtaaggacgatcgtccacggtacggtgccggtcatgcgtgaagtcgcgaggactccagctctggatgctcagcaggccatttttaactgcccggccagttaccccgtaatcggtaattgcgcggaacatttcaggaaacaggctaattatgccaatccacatagcgccgtcttttaccgtttatccggtggtttaaaaaccaggatcccaatctacttcgatactacgagtagtgagatcgactttcttgataacctgcccatcgaggaacggtacgagacgttccttgataccaaacgcatctttcaggtttgccttaatgacgagaacgtcattagatccggtttccatcatatcgacgactttaccgagatcgtagccttcagtggttactacctggcagcccatcaggtctttccagtagtagtccccctcttcaagctgaggcagctggctactatccacgacaatttcacaattcgtcagcaggttcgccgcatcacgatcgtcaacgcctttcagcttgatgatcatgtcctgattgtggtgcttccagctttccagctggacttgctgccactgacccgccttctggataaaccagggctgatagtcaaaaatgctttcggcgtcttcggtggaagaaaacactctgagccacccacgaataccgtaagagctacccatttttcccaaaacgatgggatcaacaggtgcttgcgcggtgagttgtttgctcatcatgaccaccgtgacagattaagctgctttgtttacttctttgatcagcgcagcaacgcgatcagaaatagttgcgccctggccaacccagtgagcgatgcgatccagatccaggcgagtgccttcttctttttcgctagcgattgggttgaagaaaccaacgcgctcgatgaagcgaccgttgcgtgcattacggctgtcagcgacaacaacctggtagaacggacgctttttagcgccgtgacgtgctaaacgaatagttaccataacatcctcttgtgtgaataaaacaaccggaccccatcgaggaacggagtccggtgtcatattaaaagcccgaaaattttactcatttttgcgggaattgcaatcaacagttgctaactctgctgtaaaaggccgtcggcggtgcagccagtttggtgccggagtgcgcgcagtcaccggagcgtacacgcagtacgtgaggatgacgagcacatcccggtgccaaaatggcaaacaagccaggccgattagcgaccagggaagcctgggggcatcatacccttcatgcttctcatcatcttcgccattccgcccttcttcattttcttcatcatgcgctgcatgtcgtcgaactgtttcagaagacggttaacgtcctgcacctgcataccgcaaccggcagcaatacggcgtttacggctacctttgatgatttctggcttagcgcgctctttcatcgtcatgctgttgatgatggcttccatacgcaccagcactttatcgtccatctgactcttgacgttatccgggatctgccccatgcccggcagcttgcccatcagactagccatgccgcccatatttttcatctggcgcagctgctcaagaaagtcgttgagatcgaagccgtcaccttttttcagcttgctggctaatttctctgcctgcgcgcggtcaactttgctttcgatatcttcgatcaggctcagtacgtcgcccatgccgagaatacggctcgcgatgcggtccggatggaacggctccagcgcctcagttttctcgccaacaccgaggaacttgatcggtttgccagtgatgtgacgaatagagagcgccgcaccgccgcgggcatcgccgtccactttggtcaacactacgccggtaagcggtaacgcttcattgaatgcttttgccgtattggccgcatcctgaccggtcatggcgtcaaccacaaacagggtttcaaccgggttaatgctcgcatggacttgtttgatctcgtccatcatcgcttcgtcaacgtgcagacgaccagcggtatccaccagcagcacgtcgtagaatttcagtttggcttctttcagcgccgcgttaacgatatctaccggcttctgaccaacatcagaagggaagaaatcaacgcccacctgctctgccagcgtctcaagctgtttgattgccgccgggcgataaacgtcggcagaaaccaccagcactttcttcttgtgcttctcgcgcaggaacttaccgagtttaccaacgctggttgttttaccggcaccttgcaggcccgccatcagtacgaccgcaggcggttgcgcagccaggttcagggtctggttctcttcgcccatcgccgcaaccagttcgttacggactattttgacgaactcctgccccggcgtcaggctcttattaacttcatgaccaaccgctttctcttttacgcgattgataaactcacgcactaccggcagagctacgtccgcctccagcagcgccatgcgcacttcgcgcagcgtatcttttacgttgtcttcagtgaggcgtccacggccactgatattgcgcagcgtgcggctcaaacgatcggttaaattatcaaacattgtctctcgcctggggtggaaacggttggccgcaatcgcgacacatcatcagtattttgccgcagtataacatgaaggcgtctttgttgttatgcaacggttggagcagcgtagtcctgacgctatactgcttctctttcttattgctcaaactgtcgacatcactatgcccgtttttgctctgctcgcgcttgtcgcctactccgtcagtcttgcgctgattgttcccggtctgctgcaaaaaaacggcggctggcggcgcatggctattatttctgcggtcattgcgctggtctgccacgcaatcgctctggaagcccgcatcctgcccgacggtgatagcggacaaaacctcagcctgctgaacgttggtagtttggtcagtttgatgatctgtacggtaatgaccattgtggcttctcgcaatcgtggctggctgctgctacccattgtctatgcctttgcgcttatcaacctggcgctggcaaccttcatgcccaatgaatacatcacccatctggaagctacgcctgggatgctggtgcacattggcttaagcctcttttcctatgccacgctaattatcgccgccctgtacgcgctgcaactggcgtggattgattaccaactgaagaacaagaagctggcgtttaaccaggaaatgccgccattgatgagtatcgagcgtaaaatgttccacatcacgcagattggcgtggtgctgctaacgctcacgctttgcactggcctgttctacatgcacaacttatttagcatggaaaatatcgacaaggctgtgctctctatcgtggcgtggtttgtctatattgtgctgctgtggggacattatcatgaaggatggcgtggacgccgcgtcgtctggtttaacgttgcgggcgcggtaattctgacactggcctacttcggcagccgaattgtccagcagttaatcagctaaacccagaaaaggagtttcccctggaacacatttctactactacgttgatcattattctgatcatcatggtggtcatttcagcctatttttccgggtccgaaaccggaatgatgaccctcaaccgctatcgtctgcgacatatggcgaaacagggtaatcgcagcgccaaacgcgtcgaaaaattgctgcgtaagccagaccgcctgataagcctggtgttaatcggcaataacctggtcaatattcttgcctccgcgctcggcactattgttgggatgcgtttgtacggcgatgcgggcgtggcaattgcgactggtgtgctgacttttgtcgtactggtatttgctgaggtattgccgaaaaccattgccgcgctgtacccggaaaaagtcgcttatccgagtagttttctgctggctccgctgcaaattttgatgatgccgctggtctggttgctgaatgctatcacccgtatgctgatgcgcatgatgggtatcaaaaccgatatcgtggttagcggctctttgagcaaagaagagttgcgcactatcgtgcacgaaagtcgcagtcaaatttcccgtcgcaatcaggatatgctgctgagcgtgctcgatctggaaaaaatgaccgttgatgacatcatggtgccgcgcagtgaaattatcggtattgatatcaacgatgactggaaaagcattctgcgccaactctcccacagtcctcacgggcgcatcgtgctctaccgtgatagcctggacgacgccatcagtatgctgcgagtacgtgaagcctggcggttgatgagcgagaaaaaagagttcaccaaagaaaccatgctgcgcgccgcggacgagatctattttgtgccggaaggtacgccgctcagcacgcagttggtaaagtttcagcgcaacaaaaagaaagtcggcctggtcgtcaacgagtatggagacattcaggggctggtgacggttgaagatattctggaagagattgtcggcgatttcactacgagcatgagcccaacacttgccgaagaggtcacgccgcaaaacgacggtagcgtgattatcgatggcaccgccaacgtgcgggaaatcaacaaagcctttaactggcatctaccggaagatgatgcccgcacggttaatggcgtcattcttgaggcactggaagagatccctgtcgcaggcacccgcgtgcgtattggcgagtacgatatcgatattctcgacgtacaggacaatatgattaagcaggtaaaagtttttcctgtgaaaccgctgcgcgagagtgtggcggagtaacgaaaacggcccggcattcgcatgcagggccgtgaattattacgaaagcagaaattaagcttttgctttcgctacagtaaccatcgccgcacgaatcgtacgaccattcagcgtataacccttctgcataatgcccagtacgttacctggcgcaacgtcatcagattccaccattgcgatggcctgatgcacattcgggtccagtgggacgttagtttcggcgatcacttcaacgccaaacttacgcacaacatccagcatgctcttcagcgtcagctcaatgccttcaaccatcgcagacatatccgggttagctttatcagccacttccagcgcacgatccaggctatcaatcaccggcagcaattcgttgatgaatttctccagcgcgaatttgtgggctttttcaatatccagttcagtacgacgacgcaggttttccatttcggcttttacacgcaaaatgccgtcacgttcacgggtctgggcttcagccagctgagcttcgagattcgcaactttttcatcgcgcggatccacctgctcagcagaagcttctggctcaactgcctcaatctcttcgtgctgatccatgataatttcttccggggcttgcccctcaggcgttttctgttctttactactcatgaatttctccgcgtttttttcgcattcatctcgctaacttcgcttattatggggatcagtttcagggtttcaagggaagcactcacattgtcatcaatcttcgcaacaaggacctcggaaaaatgaataatcatttcaagtgtattggcattgtgggacacccacggcaccccactgcactgacaacacatgaaatgctctaccgctggctgtgcacaaaaggttacgaggtcatcgttgagcaacaaatcgctcacgaactgcaactgaagaatgtgaaaactggcacgctcgcggagattgggcaactagctgatctcgcggtagtcgttggtggcgacggtaatatgctgggcgcggcacgcacactcgcccgttacgatattaaagttattggaatcaaccgtggcaacctgggtttcctgactgaccttgaccccgataacgcccagcaacagttagccgatgtgctggaaggccactacatcagcgagaaacgttttttgctggaagcgcaagtctgtcagcaagattgccagaaacgcatcagcaccgcgataaatgaagtggtgcttcatccaggcaaagtggcgcatatgattgagttcgaagtgtatatcgacgagatctttgcgttttctcagcgatctgatggactaattattagcacgccaacaggctccaccgcctattccctctctgcaggcggtcctattctgaccccctctctggatgcgattaccctggtgcccatgttcccgcatacgttgagtgcacgaccactggtcataaacagcagcagcacgatccgtctgcgttttagccatcgccgtaacgacctggaaatcagttgcgacagccagatagcactgccgattcaggaaggtgaagatgtcctgattcgtcgctgtgattaccatctgaatctgattcatccgaaagattacagttatttcaacacattaagcaccaagctcggctggagtaaaaaattattctaattttacgccagcctctttactgtatataaaaccagtttatactgtacacaataacagtaatggtttttcatacaggaaaacgactatgttggcacaactgaccatcagcaactttgctatcgttcgtgagcttgagattgattttcatagcggcatgaccgtaataactggcgagaccggcgcgggtaaatctattgcaatagatgccctcggtctttgtctcggtggtcgcgctgaagccgacatggtgcgtaccggcgctgctcgcgctgacctgtgcgcccgtttttctctgaaagatacgccagcggctctgcgctggctggaagaaaaccagcttgaagacgggcatgaatgtttgcttcgtcgcgtgatcagcagcgatggtcgctcccgtggtttcatcaacggtacagctgttcctctgagtcaactgcgcgaactgggtcagttgctgattcagatccatggtcagcacgctcatcaattactcaccaaacctgagcaccaaaaattcctgcttgatggctatgccaatgaaacctctctactgcaggaaatgaccgcacgttatcagttgtggcatcaaagctgccgtgacctcgcgcatcatcaacagttaagtcaggaacgcgccgcccgtgcggaactgctgcaataccaattaaaagaacttaacgaatttaatccgcagcccggagagtttgaacaaatcgacgaagagtacaaacgtctggcgaacagcggtcaattgctgaccaccagccagaatgcattggcattaatggccgacggtgaagacgcaaacctgcaaagtcagctttacacggctaaacaactggtgagcgaattgattggcatggacagcaaactgtccggcgtacttgatatgctggaagaagctaccatccagattgctgaagccagcgatgaactgcgccactactgcgatcgtctggatctcgatcccaaccgactatttgaacttgaacagcgcatcagtaaacagattagcctggcacgtaaacatcacgtcagccctgaggcattgccacagtattaccagagcctactggaagaacagcagcaactggacgatcaggccgacagtcaagaaacgcttgcgctggcggtaacgaaacatcatcagcaggcactggaaatcgcgcgcgcattacaccaacaacgccagcaatatgcagaagaacttgcacagctgatcaccgacagtatgcatgcgctcagtatgccgcatgggcagtttacgatcgatgttaaatttgacgagcatcacctgggcgctgacggtgccgatcgtattgagtttcgggtaaccaccaacccaggtcagccaatgcagcctattgccaaagtcgcatccggtggtgaattgtcccgcatcgcactggcaatccaggtcatcacggcgcgtaaaatggaaaccccggcactgatttttgatgaagtggatgtagggattagcggtccaacagcggcagttgtcggcaaactgctgcgtcaactcggcgaaagtactcaggtgatgtgtgttacccacctgccacaagtcgcgggatgtggtcatcaacactattttgtcagcaaagaaaccgatggtgcgatgacagaaacgcatatgcaatccctgaataaaaaagcgcggttacaagagctggcgcgcctgcttggtggcagtgaagtcacacgtaatacactggcgaatgcgaaagaactgcttgcagcgtaaacttttttcctgcttcacggtcagagtaaacagcaaaacgccgtaagaccggaaagcaaaaggttttaaagtgatgaaaggtctattatcatcggcatattacagatgagccacgtactgctcgggcccgaaaaggaatcaaatcactatgcgctgtaaaacgctgactgctgcagcagcagtactattgatgttgaccgcaggctgttccactctggagcgagtggtttaccgtcctgacatcaaccaggggaactatctgaccgctaacgacgtatccaaaatacgtgttggcatgacgcaacaacaagttgcgtacgcattgggtacaccgctgatgtccgatccatttggtacgaatacctggttctatgtcttccgccagcaaccaggtcatgaaggtgtaactcagcaaacgctgacgctgacctttaacagtagcggtgtgttgaccaatattgataacaaacctgcgctgagtggtaactaataataaagttgctctcaaagacgttaaaaaaggtgctcaatgagcaccttttttctgtctgttatttattcgcacttttttctgctcgttgcctgcgaagctctttcggatcggcaatgagagggcgataaatctccacccgatcgccatcatgcacactatcgcttagttttgccggacggctgtaaatgccgactttgtttttagttaaatcgatatcggtacgcaattccagcaagccactggcgcgaatagcttcttcaaccgtcgcgccctcctgcagcgtcactcgctgcaggtactgcttctcaggtagcgcataagccacctcaacggcaattttacctggcactgtaaacctctttcgcacgaaccgtaaaagcctggaccatattagccgccagctctttaaacacgcgaccaaaggcgagttcaatcaacttattggtaaactcaaagtcgagatgaaactcgatacgacacgcctcctggctcagcggcgtaaacttccatccaccaatcaatttcttgaacggcccatccaccagattcataagaatactttggttactggtcaactggttgcgggtagtaaacgttttgctgatcccagccttagagacatctaccgccgcagtcatctgcccaggagtggactccagaatccgacttccggtacaacccggcaaaaactgaggataagactgaacgtcattcactaactgatacatttgctccgcgctgtagggtaccagtgcggtccggctaatctgaggcataacaatttccatcaacaaaaatccaacaaataatatcatttatcctgctgtaaaaaaaacgctatcccggcgctgggtaacatcgggttcatgctaagatagagccttgtcccccgcaggattgatatggggtgttttcgatttcagattaccgatgattcacgacgcttatgacgaagaaaaaagcacataaacctggtagtgcgaccatcgcgcttaacaagcgcgcccgtcacgaatactttatcgaagaagagttcgaagcgggacttgccctgcaaggctgggaagttaaatccctgcgcgcaggaaaagccaatatcagcgacagctacgtccttctgcgtgacggagaggcatttctgtttggcgctaacatcacgccaatggccgtggcctccacgcatgtggtgtgcgatcctacccgtacccgcaagttacttctcaaccagcgcgaactggacagtttgtacggtcgcgtcaatcgagaaggctataccgtagtggcgctctccctgtactggaaaaatgcctggtgcaaagtgaaaatcggcgtcgccaaaggtaagaaacagcacgataaacgtagtgatatcaaagagcgcgaatggcaggtggataaagcacgtatcatgaaaaacgcccaccgttaaacctgcactccaattattgaccagttcctcaccgcgcctccctctccggcggcgcgaatgaacatcttattggctatcacatccgacacaaatgttgccatcccattgcttaatcgaataaaaatcaggctacatgggtgctaaatctttaacgataacgccattgaggctggtcatggcgctcataaatctggtatacttacctttacacattggggctgattctggattcgacgggatttgcgaaacccaaggtgcatgccgaggggcggttggcctcgtaaaaagccgcaaaaaatagtcgcaaacgacgaaaactacgctttagcagcttaataacctgcttagagccctctctccctagcctccgctcttaggacggggatcaagagaggtcaaacccaaaagagatcgcgtggaagccctgcctggggttgaagcgttaaaacttaatcaggctagtttgttagtggcgtgtccgtccgcagctggcaagcgaatgtaaagactgactaagcatgtagtaccgaggatgtaggaatttcggacgcgggttcaactcccgccagctccaccaaaattctccatcggtgattaccagagtcatccgatgaagtcctaagagcccgcacggcgcaagccctgcgggcttttttgtgccctcaatttgtcccgcgaagtccgaagagaactaattaaatccgaaccttttaggcccattgataggcccaacgaaaagctctattgtttacgttgggctaaacgcagggagactccccacctttgaaaacaggatgtagcgatgaaacttaacgacagtaacttattccgccagcaggcgttgattaacggggaatggctggacgccaacaatggtgaagccatcgacgtcaccaatccggcgaacggcgacaagctgggtagcgtgccgaaaatgggcgcggatgaaacccgcgccgctatcgacgccgccaaccgcgccctgcccgcctggcgcgcgctcaccgccaaagaacgcgccaccattctgcgcaactggttcaatttgatgatggagcatcaggacgatttagcgcgcctgatgaccctcgaacagggtaaaccactggccgaagcgaaaggcgaaatcagctacgccgcctcctttattgagtggtttgccgaagaaggcaaacgcatttatggcgacaccattcctggtcatcaggccgataaacgcctgattgttatcaagcagccgattggcgtcaccgcggctatcacgccgtggaacttcccggcggcgatgattacccgcaaagccggtccggcgctggcagcaggctgcaccatggtgctgaagcccgccagtcagacgccgttctctgcgctggcgctggcggagctggcgatccgcgcgggcgttccggctggggtatttaacgtggtcaccggtagcgcgggcgcggtcggtaacgaactgaccagtaacccgctggtgcgcaaactgagctttaccggtagcaccgaaattggccgccagttaatggaacagtgcgcgaaagacatcaagaaagtgagcctggagctgggcggtaacgcgccgtttatcgtctttgacgatgccgacctcgacaaagccgtggaaggcgcgctggccagcaaattccgcaacgccgggcaaacctgcgtctgcgccaaccgcctgtatgtgcaggacggcgtgtatgaccgttttgccgaaaaattgcagcaggcagtgagcaaactgcacatcggcgacgggctggataacggcgtcaccatcgggccgctgatcgatgaaaaagcggtagcaaaagtggaagagcatattgccgatgcgctggagaaaggcgcgcgcgtggtttgcggcggtaaagcgcacgaacgcggcggcaacttcttccagccgaccattctggtggacgttccggccaacgccaaagtgagcaaagaagagacgttcggccccctcgccccgctgttccgctttaaagatgaagctgatgtgattgcgcaagccaatgacaccgagtttggccttgccgcctatttctacgcccgtgatttaagccgcgtcttccgcgtgggcgaagcgctggagtacggcatcgtcggcatcaataccggcattatttccaatgaagtggccccgttcggcggcatcaaagccagcggtctgggtcgtgaaggtagcaagtatggcatcgaagattacttagaaatcaaatatatgtgcatcggtctttaactggagaatgcgaatgaacagcaataaagagttaatgcagcgccgcagtcaggcgattccccgtggcgttgggcaaattcacccgattttcgctgaccgcgcggaaaactgccgggtgtgggacgttgaaggccgtgagtatcttgatttcgcgggcgggattgcggtgctcaataccgggcacctgcatccgaaggtggtggccgcggtggaagcgcagttgaaaaaactgagccacacctgcttccaggtgctggcttacgagccgtatctggagctgtgcgagattatgaatcagaaggtgccgggcgatttcgccaagaaaacgctgctggttacgaccggttccgaagcggtggaaaacgcggtaaaaatcgcccgcgccgccaccaaacgtagcggcaccatcgcttttagcggcgcgtatcacgggcgcacgcattacacgctggcgctgaccggcaaggtgaatccgtactctgcgggcatggggctgatgccgggtcatgtttatcgcgcgctttatccttgcccgctgcacggcataagcgaggatgacgctatcgccagcatccaccggatcttcaaaaatgatgccgcgccggaagatatcgccgccatcgtgattgagccggttcagggcgaaggcggtttctacgccagcagcccagcctttatgcagcgtttacgcgctctgtgtgacgagcacgggatcatgctgattgccgatgaagtgcagagcggcgcggggcgtaccggcacgctgtttgcgatggagcagatgggcgttgcgccggatcttaccacctttgcgaaaagcatcgcgggcggcttcccgctggcgggcgtcaccgggcgcgcggaagtaatggatgccgtcgctccaggcggtctgggcggcacctatgcgggtaacccgattgcctgcgtggctgcgctggaagtgttgaaggtgtttgagcaggaaaatctgctgcaaaaagccaacgatctggggcagaagttgaaagacggattgctggcgatagccgaaaaacacccggagatcggcgacgtacgcgggctgggggcgatgatcgccattgagctgtttgaagacggcgatcacaacaagccggacgccaaactcaccgccgagatcgtggctcgcgcccgcgataaaggcctgattcttctctcctgcggcccgtattacaacgtgctgcgcatccttgtaccgctcaccattgaagacgctcagatccgtcagggtctggagatcatcagccagtgttttgatgaggcgaagcagtaacgccgctcctatgccggaggcgacgctgcgcgtcttgtccggcctacggggatccaggtcggataaggcgtttacgccgcatccgacaatctgtacgtgaacaggaagaaatctatgttggccgggtaaggcggagccgctctccggcaaaaagaatcaataacaattatacgcgtgacccggcgcgggaaatgtcggggcgctctcccaagtgacacactttcgagaggattcaggatggggcaaagtagccaaccacatgagttaggcggcgggctgaagagtcgccacgtcaccatgttgtctattgccggtgttatcggcgcaagtctgtttgtcggttccagcgtcgccatcgccgaagcgggcccggcggtattactggcctatctgttcgccgggctactggtggttatgattatgcggatgttggcggaaatggcggttgccacgcccgataccggtagcttttccacctatgccgataaagccattggtcgctgggcgggctataccatcggctggttgtactggtggttttgggtactggttatcccgctggaagccaacatcgccgccatgatcctgcacagttgggttccaggcattcccatctggttattttccctcgtcattaccctcgccttaactggcagtaacttattaagcgttaaaaactacggcgaatttgagttctggctggcgctgtgcaaagtcatcgctatcctggcctttattttccttggtgcagtcgcaattagcggtttttacccgtatgccgaagtgagcgggatcagtagattgtgggatagcggcggctttatgcccaacggtttcggtgcggtattaagcgcgatgttgatcaccatgttcagctttatgggcgcagaaattgtcaccattgccgccgcggaatccgacacgccggaaaaacatattgtccgcgccaccaacagcgttatctggcgtatttctatcttctatttatgttctatttttgtcgtcgtggcattaattccgtggaatatgcccggactaaaagccgtcggttcttatcgcagcgtactggaattgctcaatattccccatgcgaaattaatcatggactgcgtgatattactttccgtaaccagttgcctgaacagcgcgctgtataccgcgagtaggatgctctactccttaagtcgtcgcggtgatgctcccgcggtaatgggtaaaatcaaccgcagtaaaaccccgtacgtggcggtgttactctccaccggcgcggcattcttaacggtggtggtgaactattacgcgcctgcgaaggtatttaaatttctgatcgacagctccggcgctatcgccctgctggtttatttagtcatcgccgttagtcagttgcggatgcgcaaaattctgcgagcagaaggaagcgaaattcgcttgcgaatgtggctttatccgtggctcacctggctagtcatcggctttattacctttgtgttggtagtgatgctattccgtccggcgcaacagttagaagtgatctccaccggcttattagcgatagggattatctgtaccgtgccaattatggctcgctggaaaaagctggtattgtggcaaaaaacacccgttcataatacgcgctgatcatgatcaggagtcacaccatgaccattacgtctctggatggctatcgctggctgaagaacgatattattcgcggtaattttcaaccggatgaaaaattacgaatgagtttgctgacaagccgttatgcacttggcgttgggccgttacgggaagctcttagccaactggtggcggaacggctggtcacggtggtgaatcaaaaagggtatcgggtggcgtctatgagtgagcaggagctgctcgatattttcgacgcccgcgccaatatggaagcgatgttagtgagtctggcgattgcccgcggtggcgatgagtgggaggcagacgttctcgcaaaagcgcatctgctgagtaagcttgaggcctgtgacgccagcgagaaaatgcttgatgagtgggatctgcgtcatcaggcgtttcatacggcaattgtggcgggctgtggttctcactatttgctgcaaatgcgtgaacggttgtttgatctggcggcgcgttatcgatttatctggctgcggcgaacggtgcttagcgtggaaatgctggaggataaacacgatcagcaccagaccctgactgcggcggtactggcgcgagataccgcgcgcgccagtgagttaatgcgccagcatttactgacgccaattcccattatccagcaggcgatggctggcaattaattactcttccggaatacgcaacacttgccccggataaattttatccgggctttttagcatcggtttattcgcttcgaagattttattgtacagattagcgttaccgtagacctgtttggaaatggcactcagagtgtcgccagacttaacggtataaaactggctggcagtggctggtgtcgccgttttcacctgatcatcgacactggcaataccggaaatattccccaccgcaacaaggattttctccttcgcctcctgactcaggccgtcaccagtgaccgtcgctttgccgtcggcaatttgaatattcactttatcggcatccggtataccggttttgttcagatgctcctgcaccttcttcgcctgatcgtctttatcgtgctgacctgtaaccgcgtcccagagtttttctccggcatctttcacaaaattgaacagacccatagctacctcattcgttaacggaaacactcagaaagtgtagcagaggaacgcggcgcgttaacgccgcggggatgagcacaggtttaatcgcgggtttgcacccagaacgcgtgaatcaaaccggggatatacccaagcagtgtcaacagaatattaataatgaacgcccaaccgaaccctttaccgagcagcacgccgagcggcggcagaatgatggtgatgacgattctccagaaacccatatgtactccctataagaaaattactcattgtttaaaaagagattttatctcttaagcgtagtaattttagcggagcctgccagtttcagcttacgcttttactctcatttacgctgctgaggctggtatatgttgcatttttagtttagagtttacttaatttagaaaatacttaaataaatatgactgaactcgcgcaattacaggccagtgccgaacaggcagcggccttattgaaagcaatgagccaccctaaacgattgctgattctgtgcatgcttagcggttcccccggcaccagcgcgggagagctgacgcgcattaccggactgagtgcctctgcgacaagtcagcatctcgctcgtatgcgggacgaagggcttatcgacagccaacgggatgcccaacgcattctatattccattaaaaatgaggcggtaaatgccattatcgccaccctgaaaaatgtctattgtccgtaaggagtcactatggctttgacaaccattagcccgcatgatgcacaagaattaatcgcacgcggcgcaaagttaatcgatattcgtgatgctgatgaatatcttcgtgaacatattcctgaagcagatctggctccattatccgtgctggaacagagtggtcttccggctaaattacgtcacgagcaaattatattccactgccaggcaggtaaacgcaccagtaataatgccgataaattagcagcgattgccgcccccgcagaaatctttttactcgaagatgggattgatggctggaaaaaagcaggattgccagtagcggtaaataaatctcaacccttgccgttaatgcgccaggtgcagatcgctgcgggtggtttaatattaatcggcgttgtactgggttataccgtaaatagcggtttcttcttattaagtggctttgttggtgccgggttactgtttgcaggaatcagcggtttttgtggaatggcaaggttgttagataagatgccgtggaaccaacgagcttgagaagcgacgccggacgcgccctagcagcgacatccggcctcagtaattagatcaggaaatcgtcgagagatttaccttctgccagcgcctgagcaattggcttcggtgtacggccctgaccggtccaggttttagtttcaccgttaacatcggtgaatttatatttcgccggacgcggctggcgttttttaccagcgcgtggtgcagcagcagagctattacccaataactcttccgggttaattccgtcagctttcatcagctccagccaggtgctaattttttcctggcgctctgccagttcacgctgctgctgttcttcttcttcacgtctttctttagtgacaaccctgaatttttcgagcatttcttcaagaacgtcaatggagaattcgcgagccatcgcacggagggtgcgaatgttatttaaactttgtaacattacggacataataaagaaaaccttttaacgccaaaacaaaaaaagtatttcgtcgcgtagtgtaagcgatcacttattatatttccacaaaatttaatctatttacagtcctgcgcgagattatttcagctgttattttctgaaactctcagaataatttcaagattatatattagccattttgatgagtaatttagattattggtgaacagagcggcgctctctgctcgctaattccgcaagcctgacaaaatcaaagtgaataaaaatgcaatataacagaataaaagaaaacatccatcactggtgctttctgctgttaatgtacattgtctggcataaaaaatgctgaaaatgacccagctactacatacaccgaattctctacgcttatagcgttacctcacccccaaactttcattagtgatattaaaggtaaggccatatctaattgatttaattaaaaataaatcatatcggcatgtaaaaatccacaatgtacaaaaaacgagccgttacggaatattttatctacaaaaactgactaaataaaaatttttcactaattgattagtcatagccagcgatatacgctatgcgaaaatgcagatggcaatgagatccactgctttcatctccattaacatcccattacgcttttattaaggagcattagcatgttcagtccgcagagtcgcttgcgtcatgcagttgcagatacgttcgcgatggttgtttactgttctgtcgtgaacatgtgtattgaagttttcctctccggaatgagcttcgaacagtctttttattccagattggtagcgattccggtgaacatcttaattgcatggccatacggtatgtaccgtgatctgtttatgcgcgcggcacgcaaagttagcccgagcggctggataaaaaatctggcggatatcctggcttatgtgacgttccagagtccggtgtatgtggcgatcttgttagtggtgggcgcagactggcatcagattatggcggcggtcagtagtaacatcgttgttagcatgttgatgggggcggtttatggctacttcctcgattattgccgccgactgtttaaagtcagccgttaccagcaggtaaaagcctgactcttcttttcgcgactggcatcgccagtcgcgtctttaactggcttcgccaaataaaccattcaaataacgttcaagcgcaacacggctactaaagccatgcgggataccgtaatgctcgtgtcgctcgcctgctaaatagagcggaaattgctggtaatgatcgcaagttttaatatcggaagcgggttcagccagtgtgctactgcgttcttttaatgttggatgaattaccagagcggtacgtcccattcgcgcttcgcgattaacatagacataattttccccacggcggtaaccatacgctttctgggttaccacatcgacagtaaaaccgactttttcaagtacgcgcgccacctcgtctggtcgtaaatacatatttgatcctcgttattatcaaccgcgggcctaccttacctgattgcgcattcacaacgctttcagaaaagtccataaagccgcgatgaacctcagttaagaaaattatggtctacactgaaaattacatcgaattctaatgggggatcatatgtttaaccgaccgaaccgcaacgacgttgatgatggcgtgcaggatatccagaatgatgtcaatcaattagctgacagcctcgaatctgtattgaagtcctggggcagcgacgccaaaggggaagctgaagccgcacgcagtaaagctcaggcattgctgaaagaaaccagggcgcgaatgcatggtcgtactcgcgtccagcaagccgcgcgcgatgccgttggctgcgcggattcttttgttcgtgaaagaccctggtgtagcgtgggtacagcagctgcggtaggtatttttatcggcgcactgttaagcatgcgcaaaagctaatgcaaaaatgataataaatacgcgtctttgaccccgaagcctgtcttcggggtttctttttgcctggtgaatcacaaaaatccccctaccccgtcacgctcatatccagggtaatttcgaccactatttgctatatattgtgtggttgaatcttttttcaactacatctagtatctctgtatcaacagagagacaacccgacgcgtatcatcgcgccgtatcttcattttaaacggaaatacgaatcatgcgcattactatttacactcgtaacgattgcgttcagtgccacgccaccaaacgggcgatggaaaaccggggctttgattttgaaatgattaatgtcgatcgcgttcctgaagcggcagaagcgttgcgtgctcagggctttcgtcagttgccggtagtgattgctggcgatcttagctggtctggtttccgtccggacatgattaaccgtctgcatccagcgccacacgcggccagtgcatgagccagctcgtctacttctccagcagctccgaaaacacgcagcgttttatcgaacgtttaggtctgcccgcggtgcgcatcccgctcaatgagcgggaacggattcaggtagacgagccttacatcctgatcgtgccctcttacggcggcggcggtacggctggcgcggtgccacgacaggtaattcgctttttaaacgacgagcacaaccgggcgttgcttcgcggcgttattgcttctggtaatcgcaactttggtgaggcgtatggccgcgccggagatgtgattgcccggaaatgcggcgtgccgtggctgtaccgttttgaactcatgggtacgcaaagcgatatcgaaaacgttcgtaaaggagtaaccgaattttggcaacgacaaccgcagaatgcctgacgcaggaaacgatggattaccacgcgctgaatgcgatgcttaacctctacgatagcgcaggtcgcattcagttcgataaagaccgccaggccgttgacgcctttattgcgacgcatgtgcgtccgaacagtgtgaccttcagtagccagcagcagcgcctgaactggctggtcaacgaaggttactatgatgaaagcgttcttaatcgctactctcgcgactttgtcattacgctgtttacccacgcacacaccagcggttttcgtttccagacattcctcggggcatggaagttttacaccagctatacgttgaagacattcgacggtaaacgttatctggaagattttgccgatcgagtaacgatggtggcgctgacgctggcacaaggcgatgagacgctggcgttgcaactgaccgatgaaatgctgagtggacgctttcagccagccacgccaacattcctcaactgcggtaagcagcagcgcggcgaactggtttcctgttttttgctgcgtattgaagacaatatggagagcattggtcgggcggtaaattccgcactgcagctgagcaaacgcggcggcggcgtagcatttttgctgagcaatctgcgagaagcgggcgcgccaattaaacgtattgaaaatcaatcttctggcgtaattccggtgatgaaaatgctggaagacgcattttcctatgccaaccaactcggcgctcgtcagggggctggtgcagtctatttacatgctcatcatcccgatattctgcgttttctcgacacgaaacgggaaaatgccgacgaaaaaatccgcattaaaacactgagccttggcgtggtgatcccggatatcactttccatctggcaaaagagaatgcgcagatggcgctgtttagcccttatgacgtagagcgagtttatggcaagccgtttgccgatgtggccatcagccaacactatgacgaactggttgccgatgaacgcattcgcaaaaaatacctcaacgcccgtgatttcttccagcgactggcagaaatccagtttgagtccggctatccctacatcatgtatgaagacacggtaaaccgtgctaaccctatcgccgggcgcataaatatgagtaatctctgcagtgaaattttgcaggttaacagcgccagtgagtatgacgagaatctcgactatacccgcacaggccatgatatttcctgcaatttaggtagcttgaatattgcgcacaccatggattcccccgattttgcccgcacggtagagactgccgtgcgcggtttaacggcagtaagtgatatgagtcatatccgcagcgtgccgtccatcgaagccggaaatgccgccagccacgccatcggactggggcagatgaatttacacggctatctggcgcgagaaggcatcgcttatggtagcccggaagcactggatttcaccaatctctatttctatgccatcacctggcatgcactgcgtaccagcatgttgctggcacgcgaacgcggtgaaaccttcgccgggttcaaacagagtcgctatgccagtggtgaatattttagccaatatctgcaagggaactggcagccgaaaacggcgaaagttggcgaactgtttacccgtagcggtattacgttacctacccgtgagatgtgggcgcagctgcgcgacgacgtgatgcgctacggcatatacaaccagaatcttcaggcggtgccgccaaccggttctatctcttatatcaaccatgctacgagcagtattcatccgattgtggcgaaagtagagatacgcaaagagggcaaaacaggacgcgtttactaccctgccccgtttatgactaacgagaatctggcgctgtatcaggacgcttacgaaattggcgcagaaaagatcatcgacacctacgcggaagcgactcgccatgtcgatcaggggctgagcctgacgctttttttccccgataccgccaccactcgcgatatcaacaaagcgcagatttacgcctggcgcaagggtatcaaaacgctctattacatccgcctgcgtcagatggcgctggaaggcactgaaattgaaggctgcgtctcctgtgcactttaaggaatatctatgaaactcagtcgtatcagcgccatcaactggaacaagatatctgacgataaagatctggaggtgtggaatcgcctgaccagcaatttctggctaccagaaaaggtgccgctgagcaacgatattcctgcctggcagacattaactgtcgtagaacaacaactgacgatgcgcgtttttactggcctgacgctgctcgacacgctgcaaaatgttatcggcgcgccttctctgatgcccgatgcactcacgcctcatgaagaagcggtattaagcaatatcagctttatggaagcggttcatgcccgctcttacagtagcattttcagcacgctatgccagaccaaagatgtcgatgccgcctacgcctggagtgaagaaaacgcaccgttgcagcgaaaagctcagattattcagcaacattatcgcggtgatgatccgctgaaaaagaaaatcgccagtgtgtttcttgaatcttttttgttctattccggtttctggctgccgatgtatttttccagccgcggaaagctgaccaataccgcggacctgatccgtctgattatccgcgatgaagcagtccacggttactacataggctataaatatcagaaaaacatggaaaagatatctctgggacaacgtgaagagttgaagagtttcgccttcgatttgttgctggaactctacgacaacgagttgcaatacaccgatgagctgtacgccgaaaccccgtgggctgacgatgtgaaagcgtttctctgttacaacgccaataaggctttgatgaatctgggctacgaaccgttatttcccgcagaaatggcggaagtgaatccggcaatcctcgccgcgcttagcccgaatgccgatgaaaatcacgatttcttttccggtagtggctcctcttatgtgatggggaaagcggttgaaacagaagatgaagactggaatttctgagggtgttattttcaaaaatatcactacccgcagcagggaaataattcccgccaaatagctttttatcacgcaaataatttgtggtgatctacactgatactctgttgcattattcgcctgaaaccacaatattcaggcgttttttcgctatctttgacaaaaaatatcaactttctcgatttgctctcagcccttatatcacgggaaattccggcgatttgctcgcatcaatattcatgccacatttgccatcaggggttgcctcagattctcagtatgttagggtagaaaaaagtgactatttccattgggtaatatatcgacatagacaaataaaggaatctttctattgcatggcaattaaattagaaattaaaaatctttataaaatatttggcgagcatccacagcgagcgttcaaatatatcgaacaaggacttagtaaagaacaaattctggaaaaaactgggctaagccttggcgtaaaagacgccagtctggccattgaagaaggcgagatatttgtcatcatgggattatccggcagcggtaaatccacaatggtacgccttctcaatcgcctgattgaacccacccgcgggcaagtgctgattgatggtgtggatattgccaaaatatccgacgccgaactccgtgaggtgcgcagaaaaaagattgcgatggtcttccagtcctttgccttaatgccgcatatgaccgtgctggacaatactgcgttcggtatggaattggccggaattaatgccgaagaacgccgggaaaaagcccttgatgcactgcgtcaggtcgggctggaaaattatgcccacagctacccggatgaactctctggcgggatgcgtcaacgtgtgggattagcccgcgcgttagcgattaatccggatatattattaatggacgaagccttcagcgcgctcgatccattaattcgcaccgagatgcaggatgagctggtaaaattacaggcgaaacatcagcgcaccattgtctttatttcccacgatcttgatgaagccatgcgtattggcgaccgaattgccattatgcaaaatggtgaagtggtacaggtcggcacaccggatgaaattctcaataatccggcgaatgattatgtccgtaccttcttccgtggcgttgatattagtcaggtattcagtgcgaaagatattgcccgccggacaccgaatggcttaattcgtaaaacccctggcttcggcccacgtagcgcactgaaattattgcaggatgaagatcgcgaatatggctacgttatcgaacgcggtaataagtttgtcggcgcagtctccatcgatagccttaaaaccgcgttaacgcagcagcaaggtcttgatgcggcgctgattgatgcgccgttagcagtcgatgcacaaacgcctcttagcgagttgctctctcatgtcggacaggcaccctgtgcggtgcccgtggtcgacgaggaccaacagtatgtcggcatcattagcaaaggaatgctgctgcgcgctttagatcgtgagggggtaaataatggctgatcaaaataatccgtgggataccacgccagcggcggacagtgccgcgcaatccgcagacgcctggggtacaccgacgactgcaccgactgacggcggtggtgctgactggctgaccagtacgcctgcgccaaacgtcgagcattttaatattctcgatccgttccataaaacgctgatcccgctcgacagttgggtcactgaagggatcgactgggtcgttacccatttccgtcccgtcttccagggcgtgcgcgttccggttgattatatcctcaacggtttccagcaattgctgctgggtatgcccgcaccggtggcgattatcgttttcgctctcatcgcctggcagatttccggggtcggaatgggtgtggcgacgctggttagcctgattgccatcggcgcaatcggtgcctggagccaggcaatggtgactctggcgctggtgttaaccgccctgctgttctgtatcgtcatcggtttgccgttggggatatggctggcgagaagtccgcgagcggcgaaaattattcgtccactgcttgatgccatgcagaccacgccagcgtttgtttatctggtgccaatcgtcatgctatttggtatcggtaacgtgccgggcgtggtggtgacgatcatctttgctctgccgccgattatccgtctgaccattctggggattaaccaggttccggcggatctgattgaagccagccgcagtttcggtgccagcccgcgccagatgctgttcaaagttcagttaccgctggcgatgccgaccattatggcgggcgttaaccagacgctgatgctggccctttctatggtggtcatcgccagcatgattgccgtcggcgggttgggtcagatggtacttcgcggtatcggtcgtctggatatggggcttgccaccgttggcggcgtcgggattgtgatcctcgccattatcctcgatcgtctgacgcaggccgttgggcgcgacagtcgcagtcgcggcaaccgtcgctggtacaccactggccctgttggtctgctgacccgcccattcattaagtaactctgcacttgcccggtgacgccgggcattatcaccctgccaaaaaaaggaataacaatgcgacatagcgtactttttgcgacagcgtttgccacgcttatctctacacaaacttttgctgccgatctgccgggcaaaggcattactgttaatccagttcagagcaccatcactgaagaaaccttccagacgctgctggtcagtcgtgcgctggagaaattaggttataccgtcaacaaacccagcgaagtagattacaacgttggctacaccagccttgcttccggcgatgcaaccttcaccgccgtgaactggacgccactgcatgacaacatgtacgaagctgccggtggcgataagaaattttatcgtgaaggggtatttgttaacggcgcggcacagggttacctgatcgataagaaaaccgccgaccagtacaaaatcaccaacatcgcacaactgaaagatccgaagatcgccaaactgttcgataccaacggcgacggaaaagcggatttaaccggttgtaaccctggctggggctgcgaaggtgcgatcaaccaccagcttgccgcgtatgaactgaccaacaccgtgacgcataatcaggggaactacgcagcgatgatggccgacaccatcagtcgctacaaagagggcaaaccggtgttttattacacctggacgccgtactgggtgagtaacgaactgaagccgggcaaagatgtcgtctggttgcaggtgccgttctccgcactgccgggcgataaaaacgccgataccaaactgccgaatggtgcgaattatggcttcccggtcagcaccatgcatatcgttgccaacaaagcctgggccgagaaaaacccggcagcagcgaaactgtttgccattatgcagttgccagtggcagatattaacgcccagaacgccattatgcatgacggcaaagccagtgaaggcgatattcagggacacgttgatggttggatcaaagcccaccagcagcagttcgatggctgggtgaatgaggcgctggcagcgcagaagtaatttttattcgggcggataaggcgtttttgccgcatccgccgttctgtgcacaatgcctgatgcgacgctggcgcgtcttatcatgcctacaaaccacatcgcacatttcaacaatctatctttcatcccatattcatcaacatccgctattattgatttccagcttaatcatcacctgatgaacaaaaataatgactaaacctaatcatgagcttagcccggcgctgatcgtgctgatgtctatcgccaccggtctggcggtagccagtaactattacgcccagccattgctcgacaccatcgcgcgtaacttttccctttccgccagtagcgcaggctttattgttaccgccgcgcagttgggctatgccgcaggtctactgtttcttgttcccctcggtgatatgtttgaacgccgccgcctgattgtcagcatgaccttactggcggcatgttgattaccgccagcagtcagtcgctggcgatgatgatcctcggtacggcattaaccggtttattcagtgtcgtggcacaaattctggttccgctggcagcgacgctggctagtccggataaacgcggcaaagtggttggcactattatgagcggtctgctgttggggatcttgctggcacggacagttgccggattgctggcgaatctcggcggctggcgcaccgtcttttgggttgctagcgtgttaatggcactgatggcgctggcattatggcgtggtctgccacaaatgaaaagtgaaacccacctcaactacccacagttgttgggttccgttttcagtatgtttatcagcgataaaattctgcgtacccgcgcgttgctgggctgcctgacctttgccaatttcagcattctctggaccagtatggcctttttgcttgccgctccaccttttaactacagcgatggtgtcattggtctgtttggacttgcgggagctgccggagcgttgggcgctcgtccggcgggcggttttgccgataagggcaaaagccaccacaccacaactttcggtctgctgctgctattacttagttggctggcgatctggtttggtcacacttccgtactggcgttgattatcggaatcctggtgctggatctcaccgtgcagggcgtgcatatcactaaccagacggtaatttatcggatacatcctgatgcgcgcaatcgcctgaccgcaggttacatgactagctactttattggcggtgccgccggtagcctaattagtgccagtgcctggcaacatggcggttgggctggcgtttgtctggctggcgcgacgattgccctggttaacttactggtctggtggcgaggttttcatcgtcaggaagccgcaaattaagcaatcagcaaccgttttcgtggctttacacttataagggtgttaagaagcccatcagtctgataaggttaagatattcattcagtctatttataatattaacaatcgttaagcgtacactctatggaaagccctactccacagcctgctcctggtagcgcgaccttcatggaaggatgcaaagacagtttaccgattgttattagttatattccggtggcctttgcgttcggtctgaatgcgacccgtctgggattctctcctctcgaaagcgtttttttctcctgcatcatttatgcaggcgcgagccagttcgtcattaccgcgatgctggcagccgggagtagtttgtggattgctgcactgaccgtcatggcaatggatgttcgccatgtgttgtatggcccgagtctgcgtagccgtattattcagcgtctgcaaaaaagcaaaaccgccctgtgggcgtttggcctgacggatgaggtttttgccgccgcaaccgcaaaactggtacgcaataatcgccgctggagcgagaactggatgatcggcattgccttcagtagttggagtagctgggtatttggtacggtaataggggcattctccggcagcggcttgctgcaaggttatcccgccgttgaagctgcattaggttttatgcttccggcactctttatgagtttcctgctcgcctctttccagcgcaaacaatctctttgcgttaccgcagcgttagttggtgcccttgcaggcgtaacgctattttctattcccgtcgccattctggcaggcattgtctgtggctgcctcactgcgttaatccaggcattctggcaaggagcgcccgatgagctatgaggttctgctgcttgggttactagttggcgtggcgaattattgcttccgctatttgccgctgcgcctgcgtgtgggtaatgcccgcccaaccaaacgtggcgcggtaggtattttgctcgacaccattggcatcgccagcatatgcgctctgctggttgtctctaccgcaccagaagtgatgcacgatacacgccgtttcgtgcccacgctggtcggcttcgcggtactgggtgccagtttctataaaacacgcagcattatcatcccaacactgcttagtgcgctggcctatgggctcgcctggaaagtgatggcgattatataacccacaagaatcatttttctaaaacaatacatttactttatttgtcactgtcgttactatatcggctgaaattaatgaggtcatacccaaatggatagtagctttacgcccattgaacaaatgctaaaatttcgcgccagccgccacgaagattttccttatcaggagatccttctgactcgtctttgcatgcacatgcaaagcaagctgctggagaaccgcaataaaatgctgaaggctcaggggattaacgagacgttgtttatggcgttgattacgctggagtctcaggaaaaccacagtattcagccttctgaattaagttgtgctcttggaagttcccgtaccaacgcgacgcgtattgccgatgaactggaaaaacgcggttggatcgaacgtcgtgaaagcgataacgatcgccgctgcctgcatctgcaattaacggaaaaaggtcacgagtttttgcgcgaggttttaccaccgcagcataactgcctgcatcaactctggtccgcgctcagcacaacagaaaaagatcagctcgagcaaatcacccgcaaattgctctcccgtctcgaccagatggaacaagacggtgtggttctcgaagcgatgagctaacgcgtcatctcgctcaaaaatccagatttataaaagaaaaaatgactggccagcatcgcaacatgctggcctttttggcaagcaggtcggctcagccgatgagttaagaagatcgtggagaacaatatgagcgcaaatgcggagactcaaaccccgcagcaaccggtaaagaagagcggcaaacgtaagcgtctgctcctccttctcaccttgctctttataattattgccgtagcgatagggatttattggtttttggtactgcgtcacttcgaagaaaccgatgacgcatacgtggcagggaatcaaattcaaattatgtctcaggtgtctggcagcgtgacgaaagtctgggccgataacaccgattttgtaaaagaaggcgacgtgctggtcactctcgacccgacagatgctcgccaggcgtttgaaaaagccaaaactgcactggcttccagcgttcgccaaacccaccagctgatgattaacagcaagcagttgcaggcgaatattgaggtgcagaaaatcgccctcgcgaaagcacaaagcgactacaaccgccgtgtgccgctgggcaatgccaacctgattggtcgcgaagagctgcaacacgcccgcgacgccgtcaccagtgcccaggcgcaactggacgtcgcgattcaacaatacaatgccaatcaggcgatgattctggggactaaactggaagatcagccagccgtgcaacaggctgccaccgaagtacgtaacgcctggctggcgctggagcgtactcgtattatcagtccgatgaccggttatgtctcccgccgcgcggtacagcctggggcgcaaattagcccaacgacgccgctgatggcggtcgttccagccaccaatatgtgggtggatgccaactttaaagagacgcagattgccaatatgcgtatcggtcagccggtcactatcaccacggatatttacggcgatgatgtgaaatacaccggtaaagtggttggtctggatatgggcacaggtagcgcgttcagtctgcttccagcgcaaaatgcgaccggtaactggatcaaagtcgttcagcgtctgcctgtgcgtatcgaactggaccagaaacagctggagcaatatccgctgcgtatcggtttgtccacgctggtgagcgtcaataccactaaccgtgacggtcaggtactggcaaataaagtacgttccactccggtagcggtaagcaccgcgcgtgaaatcagcctggcacctgtcaataaactgatcgacgatatcgtaaaagctaacgctggctaatccagaggtgcgtgtgatgcaacagcaaaaaccgctggaaggcgcgcaactggtcattatgacgattgcgctgagtctggcgacattcatgcaggtgctggactccaccattgctaacgtggcgatccccactatcgccgggaatctgggcagtagcctcagccagggaacgtgggtaatcacttctttcggggtggcgaatgccatcagcatcccgcttaccggctggctggcaaagcgcgtcggggaagtgaaactgttcctttggtccaccatcgcctttgctattgcgagctgggcgtgtggtgtctccagcagcctgaatatgctgatcttcttccgcgtgattcaggggattgtcgccgggccgttgatcccgcttagccaaagtctattgctgaataactacccgccagccaaacgcagcatcgcgctggcgttgtggagcatgacggtgattgtcgcgccaatttgcggcccgatcctcggcggttatatcagcgataattaccactggggctggatattcttcatcaacgtgccgattggcgtggcggtggtgttgatgacactgcaaactctgcgcggacgtgaaacccgcaccgaacggcggcggattgatgccgtggggctggcactgctggttattggtatcggcagcctgcagattatgctcgaccgcggtaaagagctggactggtttagtagtcaggaaattatcatccttaccgtggtggcggtggtggctatctgcttcctgattgtctgggagctgaccgacgataacccgatagtcgatctgagcttgtttaagagccgcaacttcaccatcggctgcttgtgtatcagcctcgcgtatatgctctacttcggcgctattgttctgctgccgcagttgttgcaggaggtctacggttacacggcgacctgggcaggtttggcctctgcgccggtagggattattccggtgatcctgagcccgattatcggccgcttcgcgcataaactggatatgcggcggctggtaaccttcagctttattatgtatgccgtctgcttctactggcgtgcctatacctttgaaccaggtatggattttggcgcgagcgcctggccgcagtttatccaggggtttgcggtggcctgcttctttatgccgctgaccaccattacgctgtctggtttgccaccggaacgactggcggcggcaagcagcctctctaactttacgcgaacgctggcggggtctatcggcacgagcataaccacgaccatgtggaccaaccgcgagagcatgcaccatgcgcagttgactgagagcgtaaacccgttcaacccgaatgcccaggcgatgtacagtcaactggaagggcttgggatgacgcaacagcaggcaagtggctggattgcccagcagatcaccaatcaggggctgattatttccgccaatgagatcttctggatgagtgccgggatattcctcgtcctgctggggctggtgtggtttgctaaaccgccatttggcgcaggtggcggcggaggcggtgcgcactaagtacaactaagccagttcatttgaactggcttttttcaattaattgtgaagatagtttactgattagatgtgcagttcctgcaacttctctttcggcagtgccagttcttcgttgctgttgatgcgtacgtcacgttccagaatgctacgcgcaatatcctgcgcttcctgcaagctgtgcatctggtaagtgccacactggtagacgttcagttccgggatctgattctgatcctgcactttcagcacgtcttccattgccgttttccaggcatcagcaacacgctgctcatctggcgtaccaatcagactcatataaaaaccggtgcggcagcccattgggctgatatcgataatctctacaccattaccgttaagatggttacgcataaaaccagcaaacaggtgctccagggtatggatccctctttctggcatcacttctttgttcggcacgcagaagcgcagatcgaacacggtgattgcgtcgccatgcggggtgttcattgttttcgccacccgaactgcaggcgcttccatccgggtatgatcgactgtgaagctatctaacaacggcatttagccacctccggtaatttttttaaaaattttctgaactctttcttcccaggcgagtctgagtatatgaaagacgcgcatttgttatcatcatccctgaattcagagatgaaattttggccactcacgagtggcctttttcttttctgtcaggcgtgtttttccagccacaccgcaaacggttcggtatcagcggcttccatttcctgctgacggcgttcagacgcctcgcgctcggctacaaaatcctcttcgcgcagaatttccagcggctcttcacgcagcagattacggtaggcttctgcaaatgctttgcctgttccgccaataccagtatcaatcatagaccttaagatacgggcagagaaagtcagatcgggattatcgaagcaggcaaccagttcatcacacactttctgatacgcttcgccgccgttaatactatccagcgtttgcgcgacgcgtttcagatcgcggaacagatctttacccacctgcggtaacgggaactgtgcggtttcgcagccgatacccagcgtcagacccggtttgcgaccttcgaggatcacccggttccagttaacgcgtgtacaggcaagttcgctactgctcatttccggtgcatcagccagcgcacaccagaccataaacaggtcgaggaatcgcacctgctgttcatctacaccaatcgggctgaacgggttgatgtccaggctacgcacttcaatatattcaatgccgccacgtaacagcgcatcagaagggctctcgccgctgcgggtaacgcgttttggacgaatcggcgcgtacagttcgttttcaatctgcaacacgttgctgttgatttgcagcctcttaccgtctttctcaataccaatcttcgcgtactcttcgcttggcgttttgattgcctgtttaaggcccgctacgtactcgtaaagatcgttgaaggtaataccaagattgctttggcttttattggtatagccgagatcgctcaaacgaagagaggtcgcatacggcaggtaatacataccgcactcggttttctcaaacggcaggctcgttggttttccttgcaggaaagaagaacaaatcgccggagatgcaccaaacagataaggaatgacccaaccgaaacgatagtaattgcggataacgcggaaatagcccgcagaaattttctctttggcatcagcgccgctgatatcaccgcacttcgcttgccagaatgccattggcaaagagaaattgtagtgcacgccggaaatggtttgcatcagcgcgccgtagcgatttttcagcccttcacgatacagcgttttaaagcgtccggtgttagaagtgccgtactgtgccagttcgatgtcctgaccttctgcgatgtagcatggcatacttaacggccacatccgctcatcgcccatattgcgcgccgtataacgatgcagatcgcgcataaaggtcagcatatgttcaatatcaccatccactggtgtaatgaattccagcaatgcttccgcaaaatcggtagtaatccatttgtgcgtcagtgcggaacctaatgcttcaggatgacctgttgttgccagtgtgccatcagcattaacacgcaaagtttcgcgctccagcccacgctgtatcccctttaacgcctgaggatgtttttccagccaggccagcgcctgacttacgtccgggatcaaattgacctcccgcctgtcaaaatcgttttaattagcataactgtaatggtgaccatatgtgcaggcctacaattagtgccaccacatcatgccctgaacggtcgctgctgcaactgcaacatagcgtaacgctttaccaaggcacaaaaaaaagattaccggtccccagctgatgcgcatccatcccgctaacagacacagtaaatcgccaaccacgggcatccagcttaataatagcgtgactgcaccatagcgtttcagccagccggtagctttctcttgccagcggcttgttttacgcaatggaaagaaacgcccaaggataacgttagttaaccctccaaggctattacccattgttgctgttaaaactaaaacccagggatgactgatcccggaaagcaacattgccaccagcacgacttcggagttgccgggtaatagtgtagcgctgagaaaactactggcaaacaagctgaaaaggcttaacgcttcactcacagcaagcgaacatccacggcgtccatgcctgctgcacgggccgcctgaataccgaaatcggcatcttcaaagaccacacactgcgtcggttgcacgcccatacgctgcgcgcacaacaaaaatgtgtctggcgcgggtttatggtgtttgacgtgatcggcagcgacgacggcgtcaaaataatggcgtaatcccaggtgcgccagcaatgcctcagcgatggcgctttcactccccgttcctacagccattgggcgacgaccatgccaacttttcaccacatcaacaagaggaagcggttcgacgctatccagcagcatacttcttactgcttctgttttttcacgcgctaacgcatgcgggtcgagatcggcctgattcagctcaataattgcctgagcaatacgccaggtggggcttccattaagcgcaatcatcgcctgaatatcgtactgaagaccgtagtgccctaatacttcgcgccacgctttacggtgcgtaggctccgtatccaggattgtgccatccatatcaaaaattaaacctgcataacgctcgtacatggtcttctcgcaagtcgaaaaatatgacgctactttagcgtaattgcttgattttgtcgctgatggcgaaggagaagaaaattcaggaaatggataaaggagttatttagaaatgagatatttttgaaggaaattttttggagaagatggtgcatccgggaggatgactcactgacgttcgcccttcgggccgttgctggcgcaacgttatccttcctggtgcctgcggttaataccgctatctcttcgataccttcattgctgaaggttacggagaatatggtgcatccgggaggattcgaacctccgaccgctcggttcgtagccgagtactctatccagctgagctacggatgcatcgggaaaacttattctactgctgatattgataccgctactaaagccatatcaattaagagatggtgcatccgggaggattactcgccttgcggctcgcccttcgggccgttgctaaagcaacgttatcatccctagtgcctgcggttaattccgctacctcttcgataccttcattgctgaagatttcggagaatatggtgcatccgggaggattcgaacctccgaccgctcggttcgtagccgagtactctatccagctgagctacggatgcatcgggaaatttattttactgctgatattgataccgctactaaagccatatcaagtaagagatggtgcatccgggaggattcgaacctccgaccgctcggttcgtagccgagtactctatccagctgagctacggatgcatcgggaaacttactttactgcagattttttgataccgctactaaagccgtatcaagtaagagatggtgcatccgggaggattactcgccttgcggctcgcccttcgggccgttgctaaagcaacgttatcctccctggtgcctgcggttattaccgccacctcttccataccttcatcgctgaaagtacgtagaatatggtgcatccgggaggattcgaacctccgaccgctcggttcgtagccgagtactctatccagctgagctacggatgcaaatggcggtgaggcggggattcgaaccccggatgcagcttttgaccgcatactcccttagcaggggagcgccttcagcctctcggccacctcaccacacgcctcttacgagtgcttcgaagaacttgtttatcgctcatcgtcgctgcgtggcgcacatattactttctgagacttataagtcaaacaatttttcctacacttttatcgtttgcacacttcacgttcaattagtctgtaaaaacgtcaaaaagagtgttttatcaacagaagaatggaggtctgacagatagtagtaatgcaaaaaaatggagacttaagttgaatgaacgggagtaaagcgaaaagactatagagtgaaggagaaattttgagggtgcgtctcaccgataaagatgagacgcggaaagattagtaactggactgctgggatttttcagcctggatacgctggtagatctcttcacggtgaacagaaacttccttcggggcatttacgccaatacgtacctggttgccctttacccctaaaactgtcacggtgacctcatccccaatcatgagggtctcaccaactcgacgagtcagaatcagcattctttgctccttgaaagattaaaagagtcgggtctctctgtatcccggcattatccatcatataacgccaaaaagtaagcaatgacaaacacattacatctaagcagtcatggcattacattctgttaaacctaagtttagccgatatacacaacttcaacctgactttatcgttgtcgatagcgttaatgcgaatgccgtgaagcgagtccacggcattgcctgacgcttatattattgcaatttcgcgctgacccagcctttcacactggctaacgctgcaggtaaggccgcagcatccgtaccaccggcttgcgccatgtcaggacgtccaccacccttgccgcccacctgctgagcgaccataccaatcagttcccctgctttcacacgatctgtgacgtccttagatacgcctgcaatcagagaaaccttaccttcgactaccgttgccagcacgataattgtgctccccagctgattttttaaatcgtcaaccatggtacgcaacattttcggctcaacaccgctaagctcgctaaccaacagcttaacaccattaacatcaattgccttactggaaagatttgcgctctcctgtgcggcagcttgttctttaagctgttgtaactctttttccagctgacgcgtacgttccagtacactgcgcactttatcagccagattattgctatcgcctttcagcagatgcgcgacttcgcttaagcgatcgctgtctgcatgaacggtggcgatagcaccttctccggttaccgcttcgatacgacgaacgcctgcagcagtaccgctttcagagatgatgcggaacagaccaatatcaccagtgcggctggcgtgagtaccgccacacaactcggtagagaaatcgcccatgctcagcacgcgtacgcgctcatcatacttctcgccgaacagcgccatcgcacctttcgctttcgccgcttcgagatccatgatgttggtttcgatcggcaaattgcgacgaatctgtgtgttcaccaggtcttcgaccgcacgaatctcttctggtttcatcgcttcgttgtgactgaagtcgaagcgcagcaccttgtcgttaaccagactacctttctggcttacatgagtacccagaacctggcgcagcgcagcgtgcatcaggtgcgttgcggagtgattcagacgaatacgggcgcgacgagcctcatcaacatcagcctgcaccgcgtcgcccactttcagagaacccgcagcaagtttaccgatgtgaccaatcgcctggccgtatttctgcgtatcttccaccgcaaaggagaagttagcgcctttcagttcgcctttatcgccaacctgaccgccggattccgcatagaatggcgtttgatccagcacgaccacagcttcctggcctgcattgatggcatcaaccgctttaccatcaacaaacagcgcagtcactttgccgttcagttccagatggtcatagcctttaaattcagatgcactgtcaacacggatcattgcgttgtaatcggcaccaaagccgctggcttcgcgcgcgcgacgacgctgctcttccattgcagcttcaaaaccagcttcgtcaactttgatgttgcgctcacgacaaacatcagccgtcaggtcaaccgggaagccataggtgtcgtacagacggaaagcagtttcaccatccagcgtatcaccagaaagttttgccagctcttcatccagcaacgccagaccgcgctccagagtacgagcaaactgctcttcttcagtcttcagcacctgctcaacctgcgcctgctggcgtttcaggtcttcacccgcagagcccataacgtcgatcagcggaccaaccagtttgtagaagaaggtttctttcgcgccgagcatattaccgtgacgcactgcgcgacgaatgatacgacgcagtacataaccacggttttcattggacggcattacgccatccgcgatcaggaacgcacaagaacgaatgtggtcagcgattacgcgcaggcttttattgctcagatcggttgcgccagtgactttcgctaccgcctggatcagcgtgcggaacaggtcgatgtcatagttagagttaacgtgttgcagcaccgcagcaatacgctccagacccataccggtatctacagacggcttcggcagcggttccatcgtgccatcggcctggcggttgaactgcatgaagacgatgttccagatctcaatgtagcggtcgccgtcttcttccgggcttcccggagggcccccccaaatgtggtcgccgtgatcgtagaagatttcggtgcacgggccgcacggaccagtgtcacccatctgccagaagttgtcagatgcgtatggcgcacctttgttatcgccgatgcgaataatacgttcgcgcgggatccctacttctttttcccagatttcgtaggcttcgtcgtcgctttcatagacggtaacccacagacgctctttcggcagggcaaaccatttttcgctggtcagcagttcccatgcaaactgaatggcatcgtgtttgaaatagtcgccgaagctgaagttgcccagcatttcgaagaaggtatggtgacgcgcggtgtaaccgacgttttccaggtcgttgtgtttaccacccgcacgcacgcagcgttgggaagtggtagcgcgggaataattacgcttgtcgagcccaaggaacacatccttgaactggttcatcccggcgttggtaaacaacaaagttgggtcgttatggggtaccagggagctgctggcaactacctgatgtcccttactatggaaaaagtcgagaaacgcctgacggatctcagcggtgctcttgctcataattatcctgaaatcaagctaacgaaatatcgccaccagctccagcgtgtcttaaccgccgggctggtaactgaaaagtgggaataagataagttttcttgactgggaagtaaaataccgtatgcgttcagtcggcaaaatttcgccaaatctcctggatatcttccatcagatagccacgatagagcagaaaacgctggatcttaactttttcactaaagacagttggcaaaggttcgccatattttcgcgtcgcctgatcgcgcgccagtgcgcaccagtcgatgtcacattcacgcatcgctttttctgtcgcttcgcgggaaatacctttctgattcagttcctggcgaatacgcgcaggtccataacctttgcggctacggctggcgataaagcgcgcaacaaatcggctgtcatcgagatagccatgttcatggcaccaggcaataacgcgctcgtaatcttctgccgtagcatcaatctcttctgggccatttttgcccataatcggtgccgcgagtttacgtcgcagttcttgctcactgtgatcgcgcaccgccagaatgcgtaccgcacgatccaacaggcgagcatatgccgggcgacgggatgtactttctgtcatggcatatccttacaacttaaaaaagcaaaagggccgcagatgcgacccttgtgtatcaaacaagacgattaaaaatcttcgttagtttctgctacgccttcgctatcatctacagagaaatccggcgtactgttcgggttgctcagcagcaactcacgtactttcttctcgatctctttcgcggtttccgggttatctttcagccaggcagtcgcattcgctttaccctgaccgatcttctcacctttgtagctgtaccacgcgcctgctttctcgatcagcttctcttttacgcccaggtcaaccagttcgccgtagaagttgataccttcgccgtagaggatctggaattcagcctgtttaaacggcgcagcgattttgttcttcaccactttcacgcgggtttcgctacccaccacgttttcgccctctttcaccgcgccgatacgacggatgtcgagacgaacagaggcgtagaatttcagcgcgttaccaccggtagtggtttccgggttaccgaacatcacaccaattttcatacggatctggttgatgaagatcagcagcgtgttggactgcttcaggttacccgccagcttacgcatcgcctggctcatcatacgtgccgcaaggcccatgtgagagtcgccgatttcgccttcgatttccgctttcggcgtcagtgccgccacggagtcaacgacgataacgtctactgcgccagaacgcgccagggcgtcacagatttccagtgcctgctcgccggtgtccggctgggagcacagcaggttgtcgatatcgacgcccagtttacgtgcgtagattgggtccagcgcgtgttcagcatcgataaacgcacaggttttaccttcacgctgcgctgcggcgatcacctgcagcgtcagcgtggttttaccggaagattccggtccgtagatttcgacgatacggcccatcggcagaccacctgccccaagcgcgatatccagactaaggctaccggtagagatggtttccacatccatggaacggtcttcacccaggcgcatgatggagcctttaccaaattgtttctcaatctggcccagtgctgccgccaacgctttctgtttgttttcgtcgatagccatttttactcctgtcatgccgggtaataccggatagtcaatatgttctgttgaagcaattatactgtatgctcatacagtatcaagtgttttgtagaaattgttgccacaaggtctgcaatgcatacgcagtagcctgacgacgcaccgcatcacggtcgccgctgaagcattcccgccgggtaatgccttcaccgcgggcagtggcaaaagcaaaccagacggtgccgacaggcttctcttcactgccgccatccggcccggcgataccactaatagacacggcataatcagcacgagccgctttcagtgcgcctatcgccatttccaccacgacgggttcactcaccgcgccatgctgcgccagcgtctcttcgcgtacgccgatcatctgcgctttggcttcgttactgtaggtgacaaatccgcgttcaaaccaggcggagctaccggcaatatcggtaatcactttcgctacccaaccaccggtacaagactcggcagttgttacggttgcgccacgggctttcagcgcctgcccaacctgttcacttaactgcatcagttcactgtcagtcatcacaacctctgtcagtcaaaaatttatgccggacaagatagcactttcgtcaggaagatggtgttggcgttgcaattttacgaggaggattcagaaaaaagctgattagccagagggaagctcacgcccccctcttgtaaatagttactgtactcgcgccagcgccacggcttgtcctaactgccagaccgccattgcgtaatgggtgctgtggttgtaacgggtgatggtgtagaagttcggcagaccgtaccagtactggtagccggtgccaacatccagacgcagcaggctggcttgttgatggttgcccagcggctgctgtggcgttaaacctgcggcggcaagctggctaatgctgtacttagttttgaagccatttggcaagcctggagcctgaccgtttgccattaccgcgacctgatcgcctttcacccagccgtgcgctttgaaatagttcgccacgctaccgatcgcatcaaccggatcccacaggttgatatgcccgtcgccgctgaaatctaccgcatattgtttgtaagagctcggcataaactgtccgtagcccatcgccccggcaaaggaacctttcagattgagcggatcgtcctgctcgtcgcgcgccatcaacaggaaggtttccagctcgccagagaaatactccgcgcggcgtgggtagttaaaactcagcgttgccagcgcatcgaggatgcgagttttccccatcacgcgcccccagcgggtttcaacgccgataatcccgacgataatttccggcggtactccatacacctgccacgcgcgattcaacgcatcttcatactgattccagaaaaccacaccgttctgcacgttgtccggcgtaataaattttttgcgataacggagccatgcgccgttcggaccacttggcggtttcacgcttgtggttggtgcctggttatccatcagccgcagtacgctatccagacgcttcgcctgggagagaatttcctgcaactgctgacgatcgaaaccgtgtttgttcaccattttgtcgatgaactgctgggcattcgggttattagcgaaatcgccgcccatctgcatcacattgtgctgcggctcaagcaggaagccgccagacggcgttccggtggtcgtatcagtctcagtaggttttggcttgctgctacaggcggcaagcaacacaaaaaggggaagcaatgttacataacgacgcttgaacatgaggggtccatttaacagattcaaccaggggcaagtatggtaaagcatcacgccccgcacaaggaagcggtagtcactgcccgatacggactttacataactcaactcattcccctcgctatccttttattcaaactttcaaattaaaatatttatctttcattttgcgatcaaaataacacttttaaatctttcaatctgattagattaggttgccgtttggtaataaaacaataaatcctgaaggagagaacaatgatagaaaccattactcatggtgcagagtggtttatcgggctgttccaaaagggcggagaggtgtttaccgggatggtgaccggcattcttccgctgttgattagcctgctggttatcatgaacgcactgattaattttatcggtcagcatcgtattgaacgttttgctcaacgttgcgccggtaaccctgtttcccgttacctactgttaccgtgcattggcacgtttgtcttttgcaatccgatgaccctaagcctgggtcgctttatgccggaaaagtacaaacccagctactacgcggcggcctcttatagctgccacagtatgaatggcctcttcccccatatcaaccctggcgaactgtttgtttatcttggcattgccagcggtctgacaacgctgaacctgccacttggcccactggcggtgagttatctgctggttggtctggtcaccaatttcttccgcggctgggtgaccgatctgaccaccgccatttttgagaaaaagatgggcattcaacttgaacaaaaagttcacctggcaggagcaacaagttgaaataacacctggcaggagcaacatcatgacgcatattcggatcgaaaaaggaacgggtggctggggcggcccgcttgagctgaaagccacgccgggaaaaaaaatcgtctatatcaccgccggtacccggcctgcgattgttgacaaactggcacagcttactggctggcaggctattgacggatttaaagaaggtgaacccgcggaggcggaaattggtgtcgcggtaatcgactgtggcggcacattacgctgcggcatctatccgaaacgacgtattcccaccattaatatccacagcacgggcaagtccggtccgctggcgcagtacattgtggaagatatttatgtctctggcgtaaaagaagaaaacatcactgtagtaggtgatgcgacaccacaaccctcttccgtgggccgtgactatgacaccagtaagaaaatcaccgaacaaagcgatggtttactggcgaaggtgggaatgggcatggggtccaccgttgcggtgctgtttcaatctggtcgtgacaccatcgacactgtattaaaaaccattctgccgtttatggcattcgtcagcgcgctcattggcatcattatggcttctggccttggtgactggattgcccacggtcttgctccgctggcgagccatccactgggtctggtcatgctggcgctcatctgttccttcccactgcttagtcctttcctcggcccaggcgcagttatcgcacaggttatcggcgtattgattggcgtgcagattggtctcggcaatattccgccgcatctggctttaccggcactgtttgccatcaacgcgcaggcggcctgcgacttcatcccggtcggtttgagcctggcggaagcccgtcaggacacggttcgcgtcggtgtcccttctgtactggtgagccgctttttaaccggcgcgccgactgtactgatcgcctggtttgtctccggttttatctatcaataaaggctgaaacatgaccgttatttatcagaccaccatcacccgtatcggcgcgagtgccattgacgccctcagtgaccagatgctcatcacctttcgtgaaggcgcgcctgcggacctcgaagagtattgcttcattcattgccacggcgagttgaaaggtgcactccatcccggtttgcaatttagtctcgggcagcatcgctatccggtgaccgctgttggcagcgtggcggaagacaaccttcgcgaactgggtcatgtcaccctgcgcttcgatggtttaaacgaagcggaatttccgggcactgtccatgtggcaggccctgtccccgacgatatcgcgccgggaagcgttttgaagtttgaatctgttaaggagtaaaaaatgaatcaggttgccgttgtcatcggtggtgggcaaaccttaggcgcgttcctgtgccacggtctggctgccgaggggtatcgcgtcgcggttgtcgatattcagagcgacaaagccgcaaatgtggcacaagaaattaacgccgaatatggtgaaagtatggcgtacggttttggtgctgacgccactagcgagcaaagcgttctggcgctctctcgtggggtagatgaaatctttggtcgcgtggatttgctggtctacagcgccggaatagcaaaagcagcctttatcagcgacttccagctcggcgattttgaccgtagcctacaggtgaatctggtgggttatttcctgtgtgcgcgtgaatttagccgtttgatgatccgcgacgggattcaggggcgcattattcagatcaacagcaaatccggcaaagtgggcagcaaacacaactctggctacagcgcagcgaaatttggtggcgtcgggctgactcaaagtctggcgctggatctggcggagtacggcattacggtgcatagtctgatgctcggtaacctgctgaaaagcccgatgttccagagtctgttgccacaatacgcgaccaagctgggtatcaaaccggatcaagtcgagcagtattacatcgacaaagtaccgctcaaacgcggctgcgattatcaagatgtgctgaatatgctgctgttctacgccagtcctaaggcgagctactgcaccggacagagcatcaatgtcaccggcggtcaggtgatgttctgatcaacagcggagatccattaaggatctccgtgagactatagaatgcctgatgcgctacgctcatcaggcatacaggacttccgccactacattaaggaaaagttatggtatccgcactcatcaccgtcgccgttatcgcctggtgtgcgcaactggccttaggcggctggcaaatttctcgttttaaccgtgccttcgacacactatgccagcaagggcgggttggcgtgggccgttccagcgggcgctttaaaccgcgggtcgtggtcgccatcgcgctggacgatcagcagcgcatcgtcgacaccttgtttatgaaaggactgaccgtcttcgcccgaccgcaaaaaattcccgcaattaccggtatgcatgcgggtgatttacagcccgatgtgatctttccccatgatccactaagtcagaatgctctaagtttggcgcttaaactgaaacgtggataatttcgttgtgaatgttacttgcttgcgaagttatcattttgaaacctaaatcaggtaatcacgcccatgaaacctcgtcagcgtcaggccgccattctggagtatctgcaaaagcagggtaaatgcagcgttgaagaattggcgcaatactttgacaccacaggcacaaccattcgcaaagatctggtcattctggaacatgccggaaccgtcattcgtacttatggcggagtggtgttgaataaagaggaatccgatccgcctatcgatcataaaacactcatcaacacccacaagaaagagctgattgcagaagctgccgttagttttatccatgatggcgatagcatcattcttgatgctggcagtaccgttttgcagatggttcccctgctcagccgctttaataacatcacggtgatgaccaacagcctgcatatcgtcaatgcgctatccgaactggataacgaacaaactatcctgatgccaggcggaacgtttcgcaaaaaaagcgccagttttcacgggcaactggcagagaatgccttcgagcatttcaccttcgataaattgtttatgggcaccgacggcatcgatctcaatgcgggcgtaaccacctttaacgaggtttataccgtcagtaaggcaatgtgcaatgccgcgcgcgaagtgattttgatggcggacagtagtaagtttggccgtaaaagccccaacgtagtttgcagtcttgaaagcgtcgataagctgattaccgacgcaggtatcgatccggcgtttcgtcaggcgctggaagagaaagggatcgatgtgatcataaccggagagagcaatgagtgaagcactactgaacgcgggacgtcagacgttaatgctggagttgcaggaagcaagccgtttaccggaacgtctgggcgatgattttgttcgcgccgccaatatcatcctgcactgtgaaggcaaagtggtggttagcggaattggcaaaagcggccacattggtaagaaaatcgccgcaacgcttgccagtaccggcactccggctttttttgtccatccggcagaagcgctgcacggcgatctggggatgatcgaaagccgcgatgtgatgctgtttatctcttactccggtggcgcgaaggaactggatctgattattccgcgtctggaagataaatctatcgcgctgctggcgatgaccggcaaaccgacgagtccgctgggcctggcggcaaaagcggtgctggatatctccgtagaacgcgaagcctgcccgatgcaccttgcgccgacctccagcaccgtcaataccctgatgatgggtgacgcgctggcgatggcggtcatgcaggcgcgcggatttaatgaagaagattttgcccgctcccacccagccggggcactgggcgctcgcttgctgaataaagtgcatcatctgatgcgccgtgacgatgccatcccacaggtggcgttaaccgccagcgtgatggatgcgatgctggaactcagccgcaccggtctggggctggtggcggtatgtgacgctcaacaacaggtacaaggcgtctttaccgacggcgatttacgtcgctggctggttggcggcggcgcactcaccacgccagtcaatgaagcgatgacggtcggcggcaccacgttgcaaagccaaagtcgcgccatcgacgccaaagagatcctgatgaagcgcaaaatcactgccgcaccggtggtggatgaaaacggcaaactcaccggcgcaataaacctgcaggatttctatcaggccgggattatttaatccttcaatcccagacgtttcgccagccgatgcaggttggcgacgtcggtttccagcatccgcgcgcaggcagcccagttgtgatgattttgtgccagtgcctgacgaatagtttcacgctggaacgcttctgtcgcttcacgcaggttttgcttaacaacgggcaccgccgccacttctggcgtcggcaacgtcacctcaggaaaagcaaaatgttgcgcctcaagaatcacttcatcgccgctgcgggtggctctcgccagaactaccgcccgatgaatagcatgttccagttcgcgcacgtttcccggaaaactgtagtgttgcagtaaatttcgcgctccggcacttaataccacgcgggagagcccctgccgcaaacgacactgctcgcagaaataccccgccagcagaatgacatcatcgccccgctcacgcagcggcggcacgctaagtggaaacacgctcaggcgatgaaacaaatcggcgcggaatcgccctgccagcacctcttcgcgtaaatcgcggttagtcgccgccagcacgcgcacatcgacccgcaaacaacggtcatcgccaacgcgctgaatatcgccatactgcaacaccctcagcagcttggcctgcaatgccaagctcaactcgccgatctcatccagaaacagcgtgccgttatccgccatttcaaacttcccgctgcgattactgatagcgccagtaaacgctcctttcacatgcccgaacaactcactttccgccacactttccggcagtgcagcacagttgagatagaccagcggattcaccgcccgtgggctggcttcatgaatcgctttcgccaccagctccttaccggttccagtctcaccgctgatcaggacgttgagatcggacgccgccacaatctcaatctcttttttcagttgcgtcatgccaggggacaagccaatcatctgcgtctgtttcaccgcttcaaacggcgtggcatcgcctggcagcatattctggctttccagttgttcaatcagcaacgcattgcttaacgctcccgccgccagcgcagcaatcagccgtagctcttcgtcgctgaaaacatcgaactgatcgggctgcatcccgtcgagcgtcagtgcgccgatcaggttttgcccggcaaacaatggcagaccaacgcaggcgtgaaccttcagactctcctgcccaggaatcaaaccgtcatagggatcgggcaattcgctgtctgcgggaaagcgcaccacatccccggcgcgggcaatcgcttccagccgtggatgcccttccagcgcaaagcgtctaccgagtacatcctttgccagaccgtcgatggcaagcggaataaactgccggctatcgtaacgtagcaacgcagacgcatcgcactccagcacctgacgtagcgtggtgatcaggcgctgaaaacgatcctggtgaccaatcccacgctgcaattcgatggcgatattcgccagcacatcaacggaaaaactcatctttgcctcactgtcaatttgactatagatattgtcatatcgaccatttgattgatagtcattttgactactcattaatgggcataattttatttatagagtaaaaacaatcagataaaaaactggcacgcaatctgcaattagcaagacatctttttagaacacgctgaataaattgaggttgctatgtctattgtggtgaaaaataacattcattgggttggtcaacgtgactgggaagtgcgtgattttcacggcacggaatataaaacgctgcgcggcagcagctacaatagctacctcatccgcgaagaaaaaaacgtgctgatcgacaccgtcgaccataaattcagccgcgaatttgtgcagaacctgcgtaatgaaatcgatctggcggatatcgattacatcgtgattaaccatgcagaagaggaccacgctggggcgctgaccgaactgatggcacaaattcccgatacgccgatctactgtacagccaacgctatcgacagcataaatggtcatcaccatcatccggagtggaattttaatgtggtgaaaactggcgacacgctggatatcggcaacggcaaacagctcatttttgtcgaaacaccaatgctgcactggccggacagcatgatgacttacctgacaggcgacgcggtgctgttcagtaacgatgctttcggtcaacactactgcgacgagcatctgttcaacgatgaagtggatcagacggagcttttcgagcagtgccagcgttactacgccaatatcctgacgccgttcagccgcctggtaacaccgaaaattaccgagatcctgggctttaacttaccagtcgatatgatagccacttcccacggcgtggtatggcgcgataacccgacgcaaattgtcgagctgtacctgaaatgggcggctgattatcaggaagacagaatcaccattttctacgacaccatgagcaataacacccgcatgatggctgacgctatcgcccaggggattgcggaaaccgacccacgcgtggcggtgaaaattttcaacgtcgcccgaagcgataaaaacgaaatcctgactaatgtcttccgcagtaaaggcgtgctggtcggcactagcacgatgaataacgtgatgatgccgaaaatcgccgggctggtggaggagatgactggtttacgcttccgtaacaaacgcgccagtgctttcggctctcacggctggagcggcggtgcggtggatcgtctttccacgcgcctgcaggatgcgggtttcgaaatgagccttagcctgaaagcgaaatggcgaccagaccaggacgctctgaagttatgccgtgaacacggtcgcgaaatcgcccgtcagtgggcgctcgcgccgctgccgcagagcacggtgaatacggtagttaaagaagaaacctctgccaccacgacggctgacctcggcccacggatgcagtgcagcgtctgccagtggatttacgatccggcaaaaggcgagccaatgcaggacgttgcgccaggaacgccgtggagtgaagtcccggataacttcctctgcccggaatgctccctcggcaaagacgtctttgaagaactggcaagcgaggcaaaatgagtaacggcattgtgatcatcggtagcggcttcgccgcccgccaactggtgaaaaatattcgcaaacaggacgccactattccattaaccctgattgccgccgacagcatggatgagtacaacaaacctgacctcagccatgttatcagtcaggggcaacgtgccgatgaccttacccgccagacggcgggtgaatttgccgagcagtttaatctgcacctgtttccacaaacctgggtgacggatatcgatgccgaagcccgtgtggtgaaaagccagaataatcagtggcaatacgacaagctagtactggcaaccggtgccagtgcctttgtcccgcctgtgcctgggcgtgagttaatgctgacgttaaatagtcagcaagagtatcgcgcctgtgaaacgcaactgcgggatgcccgacgcgtgttgattgttggcggtggtttgattggtagcgaactggcgatggatttttgtcgtgcaggcaaagcggtcacgctaatcgacaacgctgccagtattctggcgagcttaatgccaccggaagtaagcagccgcttgcagcatcggttgacggagatgggcgttcatctgctgttgaaatctcagttacaggggctggaaaaaacggattctggcattcaggcaacgctggaccgccagcgcaatatcgaagtggatgcggtaattgccgccaccggactgcgcccggaaaccgccctggcacgacgcgccgggctgacgattaatcgcggcgtttgcgtcgatagttatctgcaaaccagtaataccgatatttacgcgctgggcgattgcgcggaaattaacggtcaggtattgccgttcctccagccgattcaacttagcgcgatggtgctggcaaaaaatcttctcggcaataacacgccgctgaaactcccggcgatgctggtgaaaatcaaaacgccggaattaccgctgcatctggcaggcgaaacccagcgtcaggatttacgctggcaaattaataccgaacgccagggaatggtggcgcgcggcgttgacgatgctgaccagcttcgcgcctttgtggtcagtgaggatcggatgaaagaggcatttggattgttgaaaacattgccgatgtaagtgggctactgtgcctaaaatgtcggatgcgacgctggcgcgtcttatccgacctacggggacgcatgtgtaggccggataaggcgtttacgccgcatccggcaatggtgtccaaatgcaacacgttttatccgttctggacttcacccgctaaccaacgcgccgcagcaataaccccctgccccagagacaaaccgccatcacccgccggtaaactctgtggaaagagcaatgtgaaatcagcgagataatgcgccagacgtgcacgcagcaaacggttatgaataaccccgccgctaaataccagcgtagtgataccacgcatcgtggcctgctcacgcatcaacgcggcaaaaccctgcgccagcgcatcatgaaacgcccacgcgcgttgattaaccggtgcctgccagttcagccactgctgccagaaagtggcgagatccagttgattgtccacccgcggcattgtcaccggatgcgtcactccgtggcaactggctgcgagcgcctccagagcacaagccgcttcaccttcataacttaacgtggctggcgcacagcccagtgccgccgccactgcatcgaaaaaacgcccacagctactcgccagcggcgcgttaattccacgctcaatggcccgcgccagcacgctccagttttgctgttgcacacttgctgtttcagagtaattctgccactccggcacaaagcgcaggcactgcgccagcaggtttcgccacggctgcttcgctgccaaatcgccacccggaagcgccactgcaggcaagccgcccaggtgctcacattcgcgatagttcacccgcaggcactcgccgccccacaaagcgccgttctcccccataccgataccgtcgagcgtcaaagcaatgacatcaccgccatccagcggccactgatgctctgccagacacgccgctgcatgggcatgatgatgcagtaccgtttgcgtcggcagattcatttcacgcgcccactggctggagacatagcccggatgcgcgtcatgcacaacgtattgcggggtaaaatcgtagatgttttgcatcaggcgtaacgcttcgcgccactgcatctggatgccatcgtcacttaaatcgcccagatgctgactcaacaccgcttgttcaccgcgcaccaggcagaaggtatttttcagatccgcgccgagacacagcacaggcggaacatttttaaagcccggaggcaaagccagcgcatccggcacatacccccggctacggcgcagcatttcgccgctttcgcgcaccacgctatcatccatccgctgcacgatgtcgcggttatgtatcaagaatccgtcggcaatgccctgcaaatccgccagcgcctgttcgttgctgatagctggtggtttaccgctcaggttgccggaggtcatcaccagcgggcattgcagttcctgtaacagcaaatgctggagcgggttcgcaggcaacattaccccgacttcgttaaggtcaggggcgatatcatcacaaagctcaggaacgtattttttatccaccagcacaatcggcgcggcgggcgtggtaagcaactggcgcgcagcgtctggtaaaccgtcagccactggcaacatgaccgccagcggtttcgccgggcgatgtttgcgcgcccgaagtgtcgccaccgcgttactgttacgtgcatcgcaggcaagatgaaatccgccaatccctttgatggcgacaattttgcccatttttaactgtgcgatagctgcctgtaatgccgcctcttgttccgcatgttcaccatgacttacccattcaagatgcgggccacactccgggcaggccaccggctgggcgtggaagcgacgatcgagcgggtcacggtactctttgtcacaggccggacatagcggaaacgccgccatcacggtaaacgggcggtcgtaaggcatggcgcgaataatggtgaaacgcgggccgcagtgggtacagttgataaacggataacgataacgccgttcgcctggggtattcatttcggcaaggcaagcagggcaagtagcggcatcgggaacaatttgcgtattcatggtgccgcctgtgctctggcgtatagtgaactcggtgggcagttgactccagataaacggctcacgctcgacgctatcaatacgcgccagcggcgggcagtgctgatacaattgaacaagaaacgtttccgggtcttcccgcagccggacttctacgccatcgccgtcattacagacatcgccgtgaagatttaattgctgtgccagctgccagacaaacggacgaaaaccgacgccctgcactttgccacgaatacgcagttggacaccgcaagatgtgttttttgccattgagttattcccgccatcatgaattgcgtaacccgccctgccggacacgacagcgtcgcatccggcagtcacaggtcggcgataccgcccgctccgtattctacgaatatttccgggaattcctttgatgccagaacagttctgtaagatttttagaacatcagcgccgtacggcggcgtttttctgcgctcagttgttcaagtttattacgatcgacacaaatcagcgcatgagtcgggcaagccgccatacacgccgggccgtcttcacgatggttgcacaggtcgcatttattggcttcggctttgtcagcccgtacattcagacccgcgccgctgttgcggatcaccggacgtaccaccacttccatcgcaccatacgggcaagccacaacgcaggttttgcaaccaatgcaacgttcctgcatcacatgaacaaaccctttatcacggctgatagcaccattcgggcagacgttagcgcacggtgcatcttcacactgacggcaaactgtcgccgtggaaatgttcacacctttaatgacatggatacgcggtaaaaaagtttccggggtcaggcttgcacagtcctgattttcctgatgagaaaccacgcacgctacttcacaggtacggcaaccaatacatttactcgcgtcagcaatgatgaaacggttcatcaaattctccagcaatgacagttaatgcgccgatacattcacaaatcatgccagtttttaatttactgttatttaaggaaattaatttctgtaatgcaggaaaaacgatgtcatcgacactagtgacgatgacatgtgatgacaatgtttatcggctaggagcaatgagactgtcgcggcggatcagttttccgctgaaggttttcggcggactgaaatccccgccatcgagcataaaaatcagccgtccaataatttcctgaatcatctcagtcaccggaatttttacgctggagagcgccggaacggtgtagggggcaatagcgatatcatcgaatccgataacactcacctgctctggcaccgctacgccgcgctcgtgtaacgctttcatcgcacctatcgccatatcgtcgttactggcaactaacgcgctaaatttagccccacgttcgagcaacatttctaccccttcggccccgctggcaggcgtccatttaccgttagcgataagtttttcattgagcgcaataccatgctgcgccagcgcgtctttatacccggcaagacgttcaatgctggtgggggaatccatgctgccggtaaggaaagcaatctcctgatgcccggcgtttatcaactctgccacggcgttaaaactggtctgtttatgatcgcaccagacgctatggctgctgtttttgcgcaggcggcgattaagcaccattatcggctgactgtgcgcgtcaatgatgtcatcgatctcatccacgcttaaaaaacgcgggtaaatcatgatcgcgtcgcagcgcagatccagcagatactgaatcgcctggcgctcttcttctgcgctgtgtttaccatctgccaatagcaactgccgccctttctcttccgccattcgcgcggcatgaaagagtaattcactaaaataaatgccgtggtaaagcgtgttggtcactaccagccccagcgtctgagtactcttcgcgctcagattgcgcgccagcaagtttggacggtaaccgctctcttctaccgcctgaaacacgcgatctttagtctcctggctgacgtagccattaccactaagcacgcgggaaacggtcgctttactaaccccggcgcgcttcgccacttccagcatcgtcgtcatcattttcatccctttacacgcaatcaacgcagtgtactgcaccgtttgccgattgtccttgcacaatcggcgggaaaaatattcaggtgaccggtttcacaaatataaaaaatgaacaattcactctcttgcttatttagtgacaactattcatgattttgtgaaaccggtttcttaattccgtttcagcatcggcatttttccgtcacgtcgactgataacaactacatctaccctactgataacaggataaaatccgatggccaaaaattatgcggcgctggcacgcagcgtgatagcggcactgggcggcgttgataacatcagcgcggtcacgcactgtatgacgcggttgcgctttgttatcaaagatgatgcacttatcgacagcccgacgttaaaaaccatccccggcgtgctcggcgtggtacgtagtgacaaccagtgtcaggtgattatcggcaataccgttagtcaagcctttcaggaagtcgtcagcctgctgccgggagatatgcagcccgcacagcccgtgggtaaacccaaactcacgctacgtcgcattggtgcggggatcctcgatgcgctgatcggcaccatgagtccgctgatcccggcgattatcggcggaagcatggtcaaactgctggcaatgatcctcgagatgagcggcgtgctgacaaaaggaagcccgaccttaaccattctgaatgtgattggtgacggtgctttcttcttcctgccgctgatggtcgcggcatctgccgccatcaaatttaaaaccaatatgagcctggcgattgccatcgcgggtgtgctggtacatccgagttttattgaactgatggcgaaagcggcccagggtgaacatgtcgaatttgccctgattccggtcaccgcggtgaaatacacctacacggtgatcccggcgctggtgatgacctggtgcctgagttatatcgaacgctgggtggacagcattacaccggcggtgaccaaaaacttcctcaaaccaatgctgattgtgttgattgccgcaccgctggcaatcctgctgattggcccgattggtatctggatcggtagcgccattagcgcgctggtttacaccattcatggttatctgggctggcttagtgtcgccattatgggcgcgctgtggcctctgctggtaatgaccgggatgcaccgcgtctttacgccaaccatcattcagaccattgccgaaaccggcaaagaagggatggtcatgccgagtgagatcggcgctaacctgagcctgggcggtagtagtctggcagtggcgtggaaaacgaaaaacccggaactgcgtcagacggcgctggctgcggcggcaagtgccattatggcggggatttccgaaccggcgttatatggcgtggcgatccgcctgaaacgtccgcttatcgccagtcttatcagcggttttatttgcggcgcggttgccggtatggcggggcttgccagccacagtatggcagcgccggggctatttaccagcgtgcagttcttcgatccggcgaatccaatgagcatcgtctgggtgttcgcggtcatggcgctggcggtggtgctgagctttatcctcacactgttgctcggctttgaggatattcctgttgaggaagcggctgcccaggcgcgaaagtatcagagcgtacaaccgaccgtcgccaaagaagtaagtcttaattgaggatgaaaatgagtgtatttccagaaagttttttatggggcggcgcgcttgccgccaaccagtctgaaggtgcgttccgtgaaggtgacaaaggtctgaccactgtcgatatgatcccacacggcgagcatcgaatggcggtgaaactggggctggaaaaacgttttcagttgcgagatgacgagttttatcccagccatgaggcgacggatttttatcatcgttataaagaagatatcgccctgatggcagagatgggattcaaggttttccgtaccagtattgcctggagccgtctctttccgcagggcgatgaaatcacgcccaatcagcagggcattgctttttatcgttctgtctttgaagagtgtaaaaagtacggtatcgaaccgctggtcacgttgtgccacttcgatgtgccgatgcatctggtcaccgaatatggctcctggcgtaaccgcaagctggtggagtttttcagccgctacgccagaacctgctttgaagcatttgatggtctggtgaaatactggctaaccttcaatgaaatcaacattatgttgcatagcccgttctccggcgcgggtctggtgtttgaagaaggtgaaaatcaggatcaggtgaaatatcaggccgcgcatcaccagctggttgccagtgcgctagccaccaaaatcgcccatgaggttaacccgcaaaatcaggtgggctgtatgctggcgggcggtaacttctacccttacagttgcaagccggaagatgtctgggcggcgctggagaaagaccgggaaaacctgttttttatcgatgtgcaggcgcggggcacgtatccggcttactctgcccgcgtattccgcgaaaaaggggtaaccatcaacaaagcaccgggcgatgatgaaatcctgaaaaacaccgtcgattttgtctctttcagctattacgccagccgctgcgccagcgcggagatgaacgccaacaacagcagtgcggcgaacgtggtgaaaagcctgcgtaatccgtatctacaggtgagcgactggggctggggaattgatccactcggtctgcgtatcaccatgaatatgatgtacgatcgttatcagaagccgctgtttctggtggaaaacggcctgggcgcaaaagatgaatttgctgccaatggcgagattaacgacgactatcgcatcagctacttacgcgaacatatccgcgcaatgggcgaagcgattgcagacggcattccgctgatgggctacaccacatggggctgtattgatttagtttccgcctctacgggtgaaatgagcaaacgctacggctttgtctttgttgaccgtgacgacgcaggcaacggtacgctgacgcgcacgcgtaagaaaagtttctggtggtataaaaaagtgattgccagtaatggggaagatttagagtaagtaacagtgccggatgcggcgtgaacgccttatccggcctacatgtcgcacgaaccatgaaggcccgataagcgcagcgcatcgggcaatttagcatttggcatcagagctggttcaccccatcaagaacatccctgtcctgattccttaatgaaaaattactcttcttccaccgctaactgcgcgaagccgccatttccttcccagccttccagtcgttgataaacggtttctaccgcatctttaatcggctgggtcatcgggtagtaaaagccgacgatatccggctgaatgccgaggaaaatcacttcgccaatatcttctttcaactggtcgataaggtaattcaacggcatgttatgggtagtcatcataaacatctcggcgatatcatccgggtcgatgatgcggatctcgccggggtttagccccatatccgtggcgtcgacaatcagcagtcgtgtcgggcgcagttcacggatagcgacgatgtcgttttccggtgcgctaccgccgtcaatcaccacccagttacctttcggcgcggcggcgcacttttccgccagcagcggacctgcgccatcatcgcccatcatgctattgccaacacagagtaaaacgtcagtcacgcagtctcctcaccatcaaatagatggcgttttcctgatgaatatcatgcagcatacttaacagcattgtactccattcctgctgctggctagtttgcgctgcccgggctttatcgaatgcgttggccagcatcggcacatggttaatgtcgatgacgatctcaccatatttcggcacgccttccattttgcggcgggcttcactgcctgcctccagagtggcaatccatgccagatattcatcccacgggcaggtgagcgccgcttccaggcaatcgataaccccaaggtggtgaccaatcgccaggctgtaatagaccacctgctgcgcctcggcgggcgtggcatcgttctcatcaataaatttatggctcagttgactgaacaccaccttttcactcatcggatacgcgcctcttcaacaacatgattcagatggctgacaatctcgttcagacgcggatcgttttccgcttccagccagcgtgcaacctgttcttcgccctgccctaactgtgtaaggtaatcatcggcaatctgacgaccgtaacgataacccgccaggcgacgtgcttcgcgatccactttcacgcgcagcggctgcaccatatcaccatgcaggatctccgccggttgttcatccagttcacccggcccacgggcgtgaattttctgctccagcaggccgagcgccattgcaaagccgtacagcgtggcggcaggcgttggcgggcagccagggatataaacatccacagggacaattttatccgtaccgccccacacgcagtagagatcgtggaagatcccgccactgttaccgcaggcaccgtaggagatacaaattttcgggtccggcgcggactgccacgcacgcagcgcaggggatcgcattgcacgggtgaccgcgccggtaaacagtaaaatatccgcatgacgcggactaggaacgactttaatgccgaagcgttctgcatcaaacagcgggctaagcgtggcgaaaatttcgatttcgcaaccgttgcagccgccgcagtccacgcggtaaacataggcagaacgtttgatttttttcagtaagctcgccttcatgctggcgatggattcatccaccgtcatggggaccggaatgccgttggcgtcacgggggcctaataaattgctcatcagatggcctctttcatatggcgagtcagttcaatacggtcggacggcaccaggcatttctggcgcttacattccgggcaagtctcaaagctttcgcggtggttttccgcgcggctgtcgccgttgtgcttaagcagcgcaatggcgtagtcgatctctttctggacggcgaaaggacgattgcagacgcggcagttgcacagcgcgaagcgggactgttgcaggaagtcttctttcttccacaccgccagttcgtactcttggctcagtttgatcgccgccgtcgggcagacttcttcgcagcgtccacagaagatgcagtgcccaagattaaactcccaggcaagctctcctgtggcgaggtcagtttcaaccgttaaggcgttactcgggcaggcattgacgcaggccgcgcagccgatgcactgctgcgggttctgctctggcttaccacggaagtttttatcaaccgcaatcggctccagcggataagagctggtcgccgtgccggttttgatgacttttttgataaaggtaaacatggcgattccttatttcagcgggctgtttttacgctcaatgctgtaacgctcgagttctttgtacggcaccactttgctcttcttcttacgcacatcgaccacggtcatgcggtcggtacaggagtagcaagggtcgaggctaccgataatcagcggcgcatcggaaacggtgttgccgcgcagcatgtagcgcagggtcggccagttcgcgtaggtcgcggcacggcagcgccagcggtacagcttctggttgtcgccggtcatgctccagtggatatcatcgccgcgcggcgcttcggcaaagcccagcgcaaagcggtgcggaatgtaggtaaagccttccaccatcagtgggccacccggcaggttatccagaccgtagtcgatcatgttcagcgcggtatagacttcgttgatacgcactttcagacgggaaataacgtcgcagccctgctcgctgtggacttccattggcagcaggccatagccgacaaacgggtgatcggcgcgggtatcacgggcgtgaccgctggcacggaccatcgggccgacgttactgaagtcgcgagcgatttccgggtccagacgaccaatgccgacagtgcgctgttccatgttcggagtgctcagcagcacatccaccagctcctgcacttcacgacgcatctgttgtgccagctggcgggtctggatcatgtcgtctttcagcagatcgcgacgaatcccgccgatcaagttcaggccgtaggttttacgcgcaccggtaaggatctctgccattttcatggaggtttcacgcacgcggaagaactgcataaagccggagtcgaagccggtaaagtgacaggccaggccaaggttgagcagatggctgtgcaagcgttctacctccagcagaatggcgcggatcatctgcgcacgttctggcacctgaatacccatcgcgttttccacgctcgtggtgtaggcggtgctgtgggcaaagccgcagatcccgcacacacggtcagagaggaaggtcacttcgttataacccatacgggtttccgccagtttttccatgccgcgatggacgtagaacagacggtagtcggcgtcgataatgttttcgccatcgacgaacagacggaagtggcccggttcatcagaagtgacgtgcagcggaccaatcggcacgacgttgtttttcttgtcgcccagttcgttgatgaactcgtaggtttcagcatcggtggtcggtgccggacgctgacgataatccatgctgtctttacgcagcggataaagttcatccggccagtcatccggcagcaccagacgacgttcatccggcagaccaaccggaatcaaaccgtacatatcgcgcacttcacgctcgccccacaccgccgccggaacgcgcggcgtcacggacggatattccggtttgttggcgtcaacttcgacgcgaaccgtaatccaacacttagtgcccttctccatgctcagcacgtagtaaacggcgtaatgaccattcagtttgcgttcgtcgttaccaaacagcacgctcagccagccaccctgtttgtagtaaagaaactccaccacttccggcaggtagttcacctttacggtgacagtcagctgatctttggtctgccaggcgtggtccagcacgacgcccggaaatgcctcattcagcgcggcgagataatgttgacctaatttttcttcagacatgctcaaactctctttaatcacgccgccagcaaggagacgaacgctaaaaatgcaaagccaaacccagcccaggtaatgcgcggagtaatatcaagacgcagacgggccatgctgttttcgaacagcgcgataaccaggacgccgaccaccagttttacgatggcaatcaccagcgccagcagcagtccaccggcggtgaaggtttccatttgtccccacggaataaacaccccgacgaacatctgcaacaccaccagctgtttcaggctgataccccatttcatgacgccaaagccgctgccgctgtattcagagagcgggccttcctgcagctcctgctcggcttccgccaggtcgaacggcagtttgcccatttcgataaaggtggcgaacgcacaggcacaaagcgccagtaccagcgggatgctctggctcagcggccagtgataaacggtgtcggtgatgttgctgatgttggtggaaccggcaacctgtgcggcaacccacagaccaagcagcagcatcggttcgaccagcacgccaagcatcgcttcacggctcgcgccgatagcggtaaacgggctaccggtatccagaccagaaatggcaaagaagaaacgcgcgatggcaaagagatacagtaaggtgatcaaatcacccagttgcggcagcggagaaccgacggtcaccaccggcagcgcagtagcgatagtcagcatgacgcccaccatcacatacggcgtcaggcggaacacccagccggaggcatccgggccgacgctctgacgccccagcagtttgataatgtcgcgatactcctgcaacacgcccggcccgcgacggttatgcaagcgggcgcgcgccacgcgggttataccggagagcagcggcgcaacggcaaataacaccagcgcctgaattaacggatataaaacactcattctcaggctcctcgactaacaataatcaccaccagtaccgccagttcaaccagcgccatccggcggaacagcaacgcactcccctcgcactgccagcccggcaccagagacaccggattcagccatttgcgtagtttcagcaccggcgcaaacgcctgtttcaccggcatggcaaaaccgtgagcggtaatcaccatacttttttcgtggtcgtaaccgcacacccaggccgcaccgcgggaacggcttggcaaacgatcgcctttgcaaatcgccataatgatgaatggcagcagcgggcaggcaatcagcagcaacgtgatcatcggttgagaaacggtggtgttagcaggctccagcggcagaggtacagcagcagagagcatcggcagtagccacggcgcagcaacaccgccaattacgcagcaaatcgccagtgccactacgcttacgctcatcaggagcggcgcacaggtggcgttttcggcttctttggtgcgcggcgcgccgaggaacgtgacgccatagactttcgccatacacatcaccgccagcgcaccggtaattgccagccccacagcgagcagcggccccagcagacgggcaacaaacgcgccactattgctcagtttgaaaaaactttgatagataacccattccccggcaaaaccattcagcggcggcagcgcagccattgccatcagcccgactaacatggcgatggagataaccggcattttcttgccaataccaccgagtttttcgatatcgcgatgaccggtacggaaccagacgctccccgccccgaggaacagtacgcttttgaacaggctatggttaagcagatggtacagaccaccgaccaggccaagagcaatcagcgccggttgttcgagcgcgatacccgttacgccagcgcccagccccagcaggatgatgccgatattttccagggtgtggtaagccagcaggcgctggatgttgtgctccaccagcgcatacagaccaccgacaaacgcggtgatcatgccgagcaccagcagcgcgatcccccaccacagcggtgcattaccgcccagcagactcagggttaaaatgcccagcaggccaattttcatgactaccgtagaaaacaacgcggcagctggcgcagaggcgttcgcatgtgcctgcggcacccagccgtgcagcggaataatcccggccagcaggccaaagccaatcactccgagcagccagatatcggaaccgagcggcagctgttgcatacgcatatccagcaggcgcagatccagcgtgccgtaacgctgccacagcagccagcaagcaatcgccagcagcagagtgccaagacgccccagcgcaaaccacagtttgccctctttgctgttgctggtgaggaacaccgcgcacagggccatgatttcggccattaccacgaacatgccgaggttgctggcaatgacggcgcagacggcggcagccatcaacatattgatctgcaagccgttgcacttcacctgcgcgtggcgatgccagtcaatgttgtagaggctgacaaacagaccgcacagaccgagcgtaatcagccaaatcgcgttaagcggagagatttgcacatcgtagcttaccaggctcagcgcaccgctcacgccaaccgcgccagtcagtacagtgaagcccgcggctgccgtatacagactaccaaccgcgccgccaattccagctatccagccacttaacgctttttgaaaagaaaagagaaatgccagaacagcggcggcgacaaaccacgccacgccgctattgatcagggaaattgcgctcatttagcctctccactttgagcctgctgaaacaaggtgagatcgccaaagtccgtgttaaaggtcagctcacgcttacgtttgctgacgcgggcgatatcggtgttatccaccagatgcagggctttagtcgggcacatccgcacgcaggccggaccttgttcatcaaagctacaaaggtcacatttgacggcgatcgcgcgaatacctggcacccagtcaagcaatgtgctgacacgcgccggagcaggcggtgccggtggcgctttcggggtattggcgtttgccggaatatccagcggacggctgccggaaaattcaattgcgccaaacgggcaggcgatgccgcacagcttgcagcttacgcacaggctttcattcaactgcacggccccatcgacgcgggtgatggcgttaaccgggcagaccaccgcgcagggtgcatcttcacagtggtgacagagctgcggcgcagattctttttcattcagcatcactctcaggcgcggcatactttgcaggccgtgctggcgatgcgtctcactacaggcggcctcacaagtgtggcagccgatacagagcgtggagtcagcaattacaaaacgattcaccaggcattcctcaggtgattgtcatttttgacgaaaacatgccgatgaaatgtcattttcgacactcatcgacacgcccatccccaaacaggcgtaacgcctgcaaaacgggcaaagcctcagctcatgctgccgggctttgtccctttaccagttggcttaaattcaccggcacattgttttcaatagcggtgtataagctgtcgtaaacgccagcgattttttcgagatagtgttccagaacctgttcgcgatcgcggatgttgaccttgccatcaatcatgccgtcaatgctcagttgcgcctgcgcaatccgctgtttgtcttcgccatcttttgtttcgacgtaatactcgatggtgtggctgttaaagccatccgccagggtgacgtaaatgcgaaaatgttcaaaaaggacgaaacagagttctttgtccggcgcgcagctcatggcgtgatgcaggcgcgctttgcttaacgtgatcccctgaaccaggctattgcagtagatgtgccactggtcctgtaggcgacgatgccgctgtgcgatgtaatcggctttctcgcttatttcccaaatagtcattgtcaggttacccgtttaacagagatgccagctttaagcattttttgtgccaacttttaatttattgttattaaagagatttttaagctaaagatgaatttcgtcgccgtgtcgacgtgtcatttcgacatcatcgacattattcaccgcagggataatcaacactggcacaattattgcttgtagctggcaatagttaatgggaggcgatatgcacgaaataaccctctgccaacgggcactggaattgatcgaacagcaggccgcaaaacacggcgcaaaacgcgtaactggggtctggctcaaaattggcgcattttcttgtgtcgaaaccagctctcttgccttttgttttgatctggtttgccgcggcagcgtggcggaaggttgtaaactgcacctcgaagaacaagaggccgaatgctggtgtgaaacatgccaacagtatgtgacgctactgacccagcgcgtccgccgctgtccacagtgtcatggtgacatgctgcagattgtggcagacgacggtttacagattcggcggatagaaatagaccaggagtgagcgatgtgtacaacatgcggttgcggtgaaggcaacctgtatatcgagggtgatgaacataaccctcattccgcgtttcgtagcgcgccatttgccccggcggcacgcccgaagatgaaaatcaccggcattaaagcgcctgaatttacccccagccagactgaagaaggcgacctgcattacggtcatggcgaagcgggcactcacgcaccgggcatgagccagcgtcggatgctggaagtcgaaattgacgtgctggacaaaaataaccgtctggctgaacgcaaccgcgcgcgctttgctgcccgcaagcaactggtgctcaacctggtttccagccctggttccggtaaaaccaccctgctgacggaaaccctaatgcgcctgaaagacagcgttccgtgcgcagttattgaaggcgaccagcaaaccgtgaacgatgccgcacgcattcgcgctaccggcacaccagcgattcaggtgaacaccggtaaaggctgccatcttgacgcacagatgattgccgacgccgcaccgcgtctgccactggacgataacggtattctgtttatcgaaaacgttggcaacctcgtatgcccggccagcttcgatctcggtgaaaaacacaaagtggcggtgctttccgttaccgaaggtgaagacaaaccactgaaatatccgcatatgtttgccgccgccagcctgatgctgctcaacaaagttgacctgttgccgtatctcaactttgacgttgaaaagtgcatcgcctgcgcccgcgaagtcaatccagaaattgaaatcatccttatttccgccaccagcggcgaagggatggaccagtggctgaactggctggagacacagcgatgtgcataaggtaaaactggctggagacacagcgatgtgcataggcgttcccggccagatccgcaccattgacggcaaccaggcgaaagtcgacgtctgcggcattcagcgcgatgtcgatttaacgttagtcggcagctgcgatgaaaacggtcagccgcgcgtgggccagtgggtactggtacacgttggctttgccatgagcgtaattaatgaagccgaagcacgcgacactctcgacgccttacaaaacatgtttgacgttgagccggatgtcggcgcgctgttgtatggcgaggaaaaataatgcgttttgttgatgaatatcgcgcgccggaacaggtgatgcagttaattgagcatctgcgcgaacgtgctagtcatctctcttacaccgccgaacgccctctgcggattatggaagtgtgtggcggtcatacccacgctatctttaaattcggcctcgaccagttactgccggaaaacgttgagtttatccacggtccggggtgcccggtgtgcgtactgccgatgggtagaatcgacacctgcgtggagattgccagccatccggaagtcatcttctgtacctttggcgacgccatgcgcgtgccggggaaacagggaagcctgttgcaggcaaaagcacgcggtgccgatgtgcgcatcgtttacagcccgatggatgcgttgaaactggcgcaggagaatccaacccgcaaagtggtgttcttcggcttaggttttgaaaccactatgccgaccaccgctatcactctgcaacaggcgaaagcgcgtgatgtgcagaatttttacttcttctgccagcacattacgcttatcccgacgttgcgcagtttgctggaacagccggataacggtatcgatgcgttcctcgcgccgggtcacgtcagtatggttatcggcaccgacgcctataattttatcgccagcgattttcatcgtccgctggtggttgctggattcgaaccccttgatctactacaaggcgtggtcatgctggtgcagcagaaaatagcggcccacagcaaggtagagaatcagtatcgtcgagtggtaccggatgccggtaacctgctggcgcaacaggcgattgccgatgtgttctgtgtcaacggcgacagcgaatggcgcggcttaggcgtgattgaatcttctggcgtgcacctgacgccggattatcaacgattcgatgccgaagcacatttccgcccggcaccgcagcaggtctgcgatgacccgcgcgcgcgttgtggtgaggtattaacgggcaaatgtaagccgcatcaatgcccgctgtttggtaacacctgtaatcctcaaaccgcgtttggtgcgctgatggtttcctccgaaggagcgtgcgccgcgtggtatcagtatcgtcagcaggagagtgaagcgtgaataatatccaactcgcccacggtagcggcggccaggcgatgcagcaattaatcaacagcctgtttatggaagcctttgccaacccgtggctggcagagcaggaagatcaggcacgtcttgatctggcgcagctggtagcggaaggcgaccgtctggcgttctccaccgacagttacgttattgacccgctgttcttccctggcggtaatatcggcaagctggcgatttgcggcacagccaatgacgttgcggtcagtggcgctattccgcgctatctctcctgtggctttatcctcgaagaaggattgccgatggagacactgaaagccgtagtgaccagcatggcagaaaccgcccgcgcggcaggcattgccatcgttactggcgatactaaagtggtgcagcgcggcgcggtagataaactgtttatcaacaccgctggcatgggcgcaattccggcgaatattcactggggcgcacagacgctaaccgcaggcgatgtattgctggtgagcggtacactcggcgaccacggggcgactatccttaacctgcgtgagcagctggggctggatggcgaactggtcagcgactgcgcggtgctgacgccgcttattcagacgctgcgtgacattcccggcgtgaaagcgctgcgtgatgccacccgtggtggtgtaaacgcggtggttcatgagttcgcggcagcctgcggttgtggtattgaacttagtgaagcggcactgcctgttaaacctgccgtgcgtggcgtttgcgaattgctgggactggacgccctgaactttgccaacgaaggcaaactagtaatagctgttgaacgcaacgcggcagagcaagtgctggcagcgttacattcccatccactggggaaagacgcggcgctgattggtgaagtggtggaacgtaaaggtgttcgtcttgccggtctgtatggcgtgaaacgaaccctcgatttaccacacgccgaaccgcttccgcgtatatgctaataaaattctaaatctcctatagttagtcaatgaccttttgcaccgctttgcggtgctttcctggaagaacaaaatgagttatacaccgatgagtgatctcggacaacaagggttgttcgacatcactcggacactattgcagcagcccgatctggccagcctgtgtgaggctcttagccaactggtaaagcgttctgcgctcgccgacaacgcggctattgtgttgtggcaagcgcagactcaacgtgcgtcttattacgcgagccgtgaaaaagacacccccattaaatatgaagacgaaactgttctggcacacggtccggtacgcagcattttgagccgccctgatacgctgcattgcagttacgaagaattttgtgaaacctggccgcagctggacgcaggtgggctatacccaaaatttggtcactattgcctgatgccactggcggcggaagggcatatttttggtggctgtgaatttattcgttatgacgatcgcccctggagcgaaaaagagttcaatcgtctgcaaacatttacgcagatcgtttctgtcgtcaccgaacaaatccagagccgcgtcgttaacaatgtcgactatgagttgttatgccgggaacgcgataacttccgcatcctggtcgccatcaccaacgcggtgctttcccgcctggatatggacgaactggtcagcgaagtcgccaaagaaatccattactatttcgacattgacgatatcagtatcgtcttacgcagccaccgtaaaaacaaactcaacatctactccactcactatcttgataaacagcatcccgcccacgaacagagcgaagtcgatgaagccggaaccctcaccgaacgcgtgttcaaaagtaaagagatgctgctgatcaatctccacgagcgggacgatttagccccctatgaacgcatgttgttcgacacctggggcaaccagattcaaaccttgtgcctgttaccgctgatgtctggcgacaccatgctgggcgtgctgaaactggcgcaatgcgaagagaaagtgtttaccactaccaatctgaatttactgcgccagattgccgaacgtgtggcaatcgctgtcgataacgccctcgcctatcaggaaatccatcgtctgaaagaacggctggttgatgaaaacctcgccctgaccgagcagctcaacaatgttgatagtgaatttggcgagattattggccgcagcgaagccatgtacagcgtgcttaaacaagttgaaatggtggcgcaaagtgacagtaccgtgctgatcctcggtgaaactggcacgggtaaagagctgattgcccgtgcgatccataatctcagtgggcgtaataatcgccgcatggtcaaaatgaactgcgcggcgatgcctgccggattgctggaaagcgatctgtttggtcatgagcgtggggcttttaccggtgccagcgcccagcgtatcggtcgttttgaactggcggataaaagctccctgttcctcgacgaagtgggcgatatgccactggagttacagccgaagttgctgcgtgtattgcaggaacaggagtttgaacgtctcggcagcaacaaaatcattcagacggacgtgcgtctaatcgccgcgactaaccgcgatctgaaaaaaatggtcgccgaccgtgagttccgtagcgatctctattaccgcctgaacgtattcccgattcacctgccgccactacgcgagcgtccggaagatattccgctgctggcgaaagcctttaccttcaaaattgcccgtcgtctggggcgcaatatcgacagcattcctgccgagacgctgcgcaccttgagcaacatggagtggccgggtaacgtacgcgaactggaaaacgtcattgagcgcgcggtattgctaacacgcggtaacgtgctgcagctgagtttgccagatattgttttaccggaacctgaaacgccgcctgccgcaacggttgtcgccctggagggcgaagatgaatatcagttgattgtgcgcgtgctgaaagaaaccaacggcgtggttgccgggcctaaaggcgctgcgcaacgtctggggctgaaacgcacgaccctgctgagtcggatgaagcggctgggaattgataaaagcgcattgatttaactgcaaattgccggacagatctgcctgtccggcatattattcatgaggttttttcggacgatatttttccggcagttctggcaccggacgcttgtcatcgatgagatgacgcacggttaagatcggatgacgccacagcattctcggcccggcccaacgcataatctgtttcatctcttcacgctttgcaggctggtaacagtgcaccggacactgcttacaggctggtttctcttcgccgaacacacatttatccagccgcttttgcgcgtaaacaaacaacgcctcgtaatgctccggctccgcactcgcctgcgggcatttcgcttgataaagatcgatcatttttttaatcgtcagtttttcacgagagatacgcttgccggacatgctgcctccacctcattaagatgtatttatattacatcttaatcttaaagggcactatgactccaaagaagaagggttagccaaccgatacaattttgcgtacttgcttcataagcatcacgcaaaagctgcaaaacagcatctttcccggaaccagcatcaagaactcgccgttcgcttcttcccctgaaatgattaactccggtatcatgtgcgccttatgtgattacaacgaaaataaaaaccatcacaccccatttaatatcagggaaccggacataaccccatgagtgcaatagaaaatttcgacgcccatacgcccatgatgcagcagtatctcaggctgaaagcccagcatcccgagatcctgctgttttaccggatgggtgatttttatgaactgttttatgacgacgcaaaacgcgcgagccaactgctggatattagtctgaccaaacgcggtgctagcgcgggagagccgatcccgatggcggggattccctaccatgcggtggaaaactatctcgccaaactggtgaatcagggagagtccgttgccatctgcgaacaaattggcgatccggcgaccagcaaaggtccggttgagcgcaaagttgtgcgtatcgttacgccaggcaccatcagcgatgaagccctgttgcaggagcgtcaggacaacctgctggcggctatctggcaggacagcaaaggtttcggctacgcgacgctggatatcagttccgggcgttttcgcctgagcgaaccggctgaccgcgaaacgatggcggcagaactgcaacgcactaatcctgcggaactgctgtatgcagaagattttgctgaaatgagcttaattgaaggccgtcgcggcctgcgccgtcgcccgctgtgggagtttgaaatcgacaccgcgcgccagcagttgaatctgcaatttgggacccgcgatctggtcggttttggcgtcgagaacgcgccgcgcggactttgtgctgccggttgtctgttgcagtatgcgaaagatacccaacgtacgactctgccgcatattcgttccatcaccatggaacgtgagcaggacagcatcattatggatgccgcgacgcgtcgtaatctggaaatcacccagaacctggcgggtggtgcggaaaatacgctggcttctgtgctcgactgcaccgtcacgccgatgggcagccgtatgctgaaacgctggctgcatatgccagtgcgcgatacccgcgtgttgcttgagcgccagcaaactattggcgcattgcaggatttcaccgccgggctacagccggtactgcgtcaggtcggcgacctggaacgtattctggcacgtctggctttacgaactgctcgcccacgcgatctggcccgtatgcgccacgctttccagcaactgccggagctgcgtgcgcagttagaaactgtcgatagtgcaccggtacaggcgctacgtgagaagatgggcgagtttgccgagctgcgcgatctgctggagcgagcaatcatcgacacaccgccggtgctggtacgcgacggtggtgttatcgcaagcggctataacgaagagctggatgagtggcgcgcgctggctgacggcgcgaccgattatctggagcgtctggaagtccgcgagcgtgaacgtaccggcctggacacgctgaaagttggctttaatgcggtgcacggctactacattcaaatcagccgtgggcaaagccatctggcacccatcaactacatgcgtcgccagacgctgaaaaacgccgagcgctacatcattccagagctaaaagagtacgaagataaagttctcaccagtaaaggcaaagcactggcactggaaaaacagctttatgaagagctgttcgacctgctgttgccgcatctggaagcgttgcaacagagcgcgagcgcgctggcggaactcgacgtgctggttaacctggcggaacgggcctataccctgaactacacctgcccgaccttcattgataaaccgggcattcgcattaccgaaggtcgccatccggtagttgaacaagtactgaatgagccatttatcgccaacccgctgaatctgagcccgcagcgccgcatgttgatcatcaccggtccgaacatgggcggtaaaagtacctatatgcgccagaccgcactgattgcgctgatggcctacatcggcagctatgtaccggcacaaaaagtcgagattggacctatcgatcgcatctttacccgcgtaggcgcggcagatgacctggcgtccgggcgcagtacctttatggtggagatgactgaaaccgccaatattttacataacgccaccgaatacagtctggtgttaatggatgagatcgggcgtggaacgtccacctacgatggtctgagcctggcgtgggcgtgcgaggaaaatctggcgaataagattaaggcattgacgttatttgctacccactatttcgagctgacccagttaccggagaaaatggaaggcgtcgctaacgtgcatctcgatgcactggagcacggcgacaccattgcctttatgcacagcgtgcaggatggcgcggcgagcaaaagctacggcctggcggttgcagctctggcaggcgtgccaaaagaggttattaagcgcgcacggcaaaagctgcgtgagctggaaagcattagcccgaacgccgccgctacgcaagtggatggtacgcaaatgtctttgctgagtgtaccagaagaaactagccctgcggtcgaagctctggaaaatcttgatccggatagtctcaccccgcgtcaggcgctggagtggatttatcgcttgaagagcctggtgtaataacaattcccgatagtcttttgctatcgggaatattaacgacaactgacgaataaaataaaaacaccctgtataataggaaagcttattttacagggtaaaaccatgccatctacacgctatcaaaaaatcaatgcccatcactatcgccatatatgggtcgttggtgatattcatggtgaatatcagttattacaatcccgcttacatcaactctcttttttccccaaaatcgacttacttatttctgtcggcgataatattgatcgtggaccggagagtcttgacgtcctgcgcctgctaaaccaaccctggtttacgagcgttaaaggcaaccacgaagcgatggcgcttgaggcattcgaaactggcgatggcaatatgtggcttgccagcggtggtgactggtttttcgatttaaatgatagtgagcaacaagaggcaatagatctgttgctgaaattccatcaccttccacatattattgaaatcactaacgacaacataaaatatgccatcgcacatgcagattatccggggagtgaatatctctttggtaaagaaatagcggagagcgaattactctggcctgttgatcgtgtgcagaaaagccttaatggcgagttacaacaaataaacggcgctgattattttatatttggacatatgatgtttgataacattcagacgttcgctaaccagatttatattgataccggaagcccgaacagcgggcggctgagtttttataaaataaagtaatctcatgcttcttctgtgaagcatgagtaacccggtgttattgcaggccattattcatttttcgctaccagcaaagagagatcctgcttcaccagcgcgcgactggcactctccggcaaaccgtcgtctgtaataatctgatcaaactcgcttaatggtaacgccagccatgtcgccacctgaccatatttcgtcgcatcacagaccaaaactcgctggcggctggcactggcaatcgcccgtttcaccgtgactttatcttccgctggcgtagaaatcccccgcacactccaactgcttgcagaaataaaagcctgatcaatcatcaggctgcgcagcatggtcgcagcggcttccccgacacaggaacggttttcccgacacactgcaccgccagtgtgaataattgtgcaattactgttgtcgagcaagtagtccgcaataacgaaatcgtttgtgaccacagtcagactctccatgtgaatcagatgctgtgctatcgctaacgtggtcgttcccgcatccagatagatacaacttcccggctgaacaagacttgccgccagcttgccaatagccgctttttgcgtcattgccagcgcagtttttacctgatgagaaggttcatgcgccacgcgtcccggagactggacgcctccggacaccagcacaacggctccctgctgctccagtttttgtaaatcccgacgaatggtcatatgactcacattcattctgtccgttagttcagcaatactgacaatgcctttttcagctaccatctcaaggatgatttggcgacgctctacgggtatcaacttttgctccttcctttgtcctgcactcattctacgctatttgcctgcgaaacgtgcgcggcgcaactaacgcttagttcacataaaataacacacaatgttaatttatgtgaatcagatcaccataccgttatcttccagcgcttatattcacaatatcaaacaaaatatcacttaaattaacaaggagagcagatgaaaacgggatctgagtttcatgtcggtatcgttggcttagggagtatgggaatgggagcagcactgagttatgtccgcgcaggtctttctacctggggcgcagacctgaacagcaatgcctgcgctacgttgaaagaggcaggtgcttgcggggtttctgataacgccgcgacgtttgccgaaaaactggacgcactgctggtgctggtggtcaatgcggcccaggttaaacaggtgctgtttggtgaaacaggcgttgcacaacatctgaaacccggtacggcagtaatggtttcttccactatcgctagtgctgatgcgcaagaaattgctaccgctctggctggattcgatctggaaatgctggatgcgccagtttctggtggtgcagtaaaagccgctaacggtgaaatgactgtcatggcctccggtagcgatattgcctttgaacgactggcacccgtgctggaagccgttgccggaaaagtttatcgcataggtgcagaaccgggactaggtagcaccgtaaaaattattcaccagttgttagcgggcgtacatattgctgccggagccgaagcgatggcacttgcagcccgtgcggggatcccgctggatgtgatgtatgacgtcgtgaccaatgccgccggaaattcctggatgttcgaaaaccggatgcgtcatgtggtggatggcgattacaccccgcatagtgccgtcgatatttttgttaaggatcttggtctggttgccgatacagccaaagccctgcacttcccgctgccattggccagtacagcattgaatatgttcaccagcgccagtaacgcgggttacgggaaagaagacgatagcgcagttatcaagattttctctggcatcactctaccgggagcgaaaagttgagctaaactctaccgggagcgaaatcatgatcaagattggcgttatcgccgatgattttaccggcgcgacggatatcgccagttttctggtggaaaacggtctaccaacggtacaaattaacggtgttccaacaggtaaaatgccggaagcaatcgacgcactggtgatcagcctgaaaacgcgctcctgtccagtggttgaagccacacagcaaagcctggcggctctgagctggttgcaacagcaaggttgcaaacagatctatttcaaatactgctctactttcgacagtacggcgaaaggtaatattggcccggttaccgatgccttaatggatgctctcgacacgccgtttacggtcttctctccggccctgccggtcaacggacgtacggtttatcaggggtatttgttcgtaatgaatcaactgctggccgaatccgggatgcgccatcacccggtaaatcccatgaccgacagctatcttccccgtctggttgaagcgcaatccacagggcgctgcggcgtcgttagcgcacatgttttcgaacaaggtgtggatgccgttcgtcaagagctggctcgcttacagcaagagggctaccgctacgcggtgcttgatgcgctgaccgaacaccatctggaaattcagggagaagccttgcgcgatgccccactggtaacgggcggttctggtctggcgattggcctggcccggcagtgggcgcaagaaaacggtaaccaggctcgcaaagcagggcgtccgctcgctgggcgcggcgtagtgctctccggtagttgctctcaaatgaccaaccgccaggtagcacattaccgtcaaattgcaccagcccgtgaagttgatgtggcacgctgcctcagtattgaaactctggccgcttatgcacacgaactggcagagtgggttctgggccaggaaagtgtacttgctccactggtttttgccaccgccagcactgacgcattggcagcaattcaacagcaatacggtgcacaaaaagccagtcaggcagtagaaacactgttttctcaactagcggcgcggttagcagcggaaggcgtgacacgctttattgtcgcaggcggtgagacctccggcgtagtcacacagagcctgggaataaaagggtttcatattggcccaaccatttccccggcgtgccgtgggtaaacgcactggataagcctgtctcactcgcccttaaatctggcaacttcggtgatgacgcctttttttcacgagcccaaagagagtttttatcatgagcgatttcgcaaaagtagagcagtctttgcgagaggagatgacgcggattgccagtagtttctttcagcgcggctatgcaaccggtagcgctggcaatctgagcctgcttttacctgacgggaatttactggcgacaccgacaggtagttgcctgggcaatctcgatccgcagcggctttccaaagtcgccgcggatggcgaatggttaagtggtgacaaacccagcaaagaggtgctctttcatctggcgctgtatcgcaacaatccgcgctgtaaagcggtggtgcatttgcacagcacatggagcacggcgctttcctgcctgcaagggctggacagcagcaacgttattcgtccgttcacaccatacgtggtgatgcggatgggaaatgtcccgctggtgccttattaccgaccgggcgataaacgcatcgcacaggatctggcggaactggcagcagacaatcaggcttttttactggcaaatcatggcccagtggtttgcggtgaaagcctgcaagaagccgccaacaatatggaagagctggaggaaacggcaaagctgatttttattctcggtgaccgcccgatccgttatctgaccgcaggtgaaattgcggaattaaggagttaatgcaatgcctcgttttgcagctaatttatccatgatgttcaccgaagtgccttttattgaacgcttcgccgcagcgcgaaaagccgggttcgatgctgtggaatttctgtttccctataactactccaccctgcaaatccaaaagcaactggagcaaaaccatctgacactggcgctgttcaataccgctcccggagatattaatgcgggggaatggggattatccgcccttcccggacgtgagcacgaagcacacgcagacatcgacctggcactggaatatgcattggcgctcaattgtgaacaagtccatgtgatggcaggcgtcgtgcccgctggcgaagatgctgaacggtaccgggcagtatttatcgataatatccgctacgctgccgaccgctttgcgccacacggcaagcgaatattagttgaagcactcagccccggcgttaagcctcattatctcttctccagccagtatcaggcactggctattgttgaagaggttgcgcgagataacgtgtttattcaactagatacttttcatgcgcaaaaagtagatggcaacctgacgcatttaatccgcgactacgccgggaaatatgcgcacgtacaaattgccggactacctgatcgacatgaaccggacgatggagaaatcaactatccgtggctgttccgcctgttcgatgaggtgggatatcagggctggatcggttgtgaatataaacctcgtggcctcaccgaagaagggcttggctggtttgacgcctggcgctaattcgttaaatccctaattacaacgtacccatacatccccccatctacggatggggtaggttaactataactttcagacagggtttcccatgtccacaattacattgttatgcattgcgttagctggcgtaatcatgctgttgctgctggtcatcaaggcaaaggtacaaccattcgttgctttgctcctcgtcagcctgttagtcgcacttgcggcaggtataccggcgggcgaagtgggtaaagtgatgatcgccgggatgggcggtgtgcttggttccgtcactattattattggtctgggcgctatgctggggcgtatgatcgaacactctggtggtgcagagagtctggctaattatttcagtcgcaagttaggtgacaaacgaactatcgctgcgctgactctggcagcgttcttcctcggtattcccgtcttctttgatgtcggctttattattcttgcgccaatcatttacggttttgccaaggttgccaaaataagcccactcaaatttggcctgcctgtcgctgggatcatgctcactgttcacgtggcggtaccgccgcatccaggccctgtcgccgcagcggggttactccacgcagacatcggctggctaaccatcatcggtattgcgatttctattcccgtaggggttgttggctactttgcagcgaaaataatcaataagcgccaatatgcgatgagtgtagaagtactggaacagatgcaactggctccggccagtgaggaaggcgcgacaaaattaagcgataaaataaatccaccgggcgtcgcgctggtcaccagcctaattgttattcctatcgcgattatcatggcgggtacggtttccgcaacactgatgccgcctagccatcccctgcttggtacgctacagctgatcggcagtccaatggtagctctaatgattgcgctggtgctggcattctggttattggctttacgtcgcggctggagcttacaacacaccagcgacattatgggcagtgcgcttcctactgcggcggtagtgattttggttactggtgctggaggggtatttggcaaagtgctggtggaaagcggcgtcggcaaagcccttgccaacatgctacaaatgattgacctgcctctgttaccagccgcatttattattagtctggcgctgcgtgcaagccaggggagtgcaaccgtagcaatactgacaaccggcgggttactcagtgaagcggtgatgggattgaatccgattcagtgcgtattggtgacgctggcagcctgctttggtgggcttggtgcgagtcatattaatgacagtgggttctggattgtgaccaaatatctggggttgagcgtagcagacggtctgaaaacctggacagtgttaacgaccattctcggttttaccggattcttaattacctggtgcgtatgggcggtaatttgaccttaataaaaaggtccgatgggcatcggaccttttattgtgcacagaaaaggccagcctcgcttgagactggcctttctgacagatgcttacttactcgcggaacagcgcttcgatattcagcccctgcgtttgcaggatttcgcgcaaacggcgcaggccttcaacctgaatctggcgaacacgttcacgggtgaggccaatttcacgacctacatcttccagtgttgccgcttcgtaccccagcaaaccgaatcgacgtgccagcacttcacgctgtttggcgttcagctcgaacagccatttgacgatgctctgcttcatatcgtcatcttgcgtggtatcttccggaccgttctctttttcatcggccaggatgtccagcaacgctttttcggaatcaccacccagcggggtgtctacgctggtaatgcgctcgttaagacgaagcatacggctgacgtcatcaactggcttatccagttgctctgcgatctcttccgcacttggttcatggtccagcttatgggacaactcacgtgcggttcgcaggtaaacgttcagctcctttacgatgtgaatcggcaaacgaatagtacgggtttggttcataatcgcccgttcaatcgtctggcgaatccaccaggttgcgtatgtactgaagcggaaaccacgttccgggtcaaacttctctaccgcgcggatcagccccaggttgccctcttcgataaggtccagcaacgccagaccacgattgccataacggcgggcaatttttaccaccagacgcaagttactctcgatcatccggcggcgagaggcgacatctccacgcagtgcgcgacgcgcaaaataaacttcttcttcggccgttaacagtggactataaccaatctcaccaaggtaaagctgagtcgcgtccaacacacgctgtgtggctccctggcttaacagttcctcttcggccaaatcgttatcactgggttcctgttctactaaggccttttcgtcaaaaacctcaactccgttctcatcaaattccgcatcttcatttaaatcatgaactttcagcgtattctgactcataaggtggctcctacccgtgatcccttgacggaacattcaagcaaaagcctggttccgccgatttatcgctgcggcaaataacgcagcgggtttacggatttccccttgtaacgaatttcaaaatgcaagcgtgtactactggttccggtgctacccatggtcgctattttttgccccgccttaacttcttgttgttcccggaccagcattgtgtcgttatgggcgtaggcactcaggtaatcatcattatgtttgatgataatcagattaccgtagccgcgcagcgcgttaccagcataaacaacgcggccatctgcggtcgcgataattgcctgtcctttgctgcctgcgatatcaatccccttgttgcccccctcagaagcgccaaaggtttcgatcactttgccctcagtcggccagcgccaggtggagataggcgtactggtacttgtactgctgacagtcggctcggttgtgcttgctgttggtaccgttacaggcgctgtgaccgtggtcgcagttggcttgttgttcggcaacattttgttagcactctgttcaccgctagactcagaatacgtaattgtcggttggctcgcaacagcaacggtggaattttgtgcaggcttgatcacaactccttgctctgctgcgtcggcctgggtaatggcatttccgccagtgattggcgtaccggaagcattacccacctgcaaggtctgaccaacgttcagcgcgtatggtgcctgaatattgttgcgctgagcaaggtcacggaaatcgttgccagtaatccaggcgatatagaaaagtgtgtcgccttttttcacggtataggtactgccgctataactgcctttcggaatgttcccatactgacggttatagacgatgcgtccgttttccatctgtaccggctgctgagctactggctgcactggctggatttgcggttgttgagtagcctgaatttgtggctgctgcaccggctgaatttgcggttgctgcgctgtagacgtcgtccccattttcggcggcggcgtaatcaacataccagaattagtatttgcaggcgcattgccattaacggagctgaccggtgccggtggattactagtgtcagaacagcctgccagccataggctaaccagactcaaagccgcaatgcggcgaacggtgaattttgggcttcccgcgctcatttatcccccaggaaaaattggttaataaccagtgacataattaccgtgcaaggcaccctactgaacactggaaaagatgttcacgatacgctgacctgcggcaaaataaccaggaaaaatccaggtatttcctcacgttttaagccagctcacccttcactaaagggacaaagcgcacggcctccacggtatcgataataaattcgcctccccgacgacgcacccgtttcaaatactggtgctcctcccctacgggtaagacgagaatcccgccttcgtccagctgcgtcattagcgcagttggaatttccggcggtgccgccgtaacaatgatagcgtcaaacggcgcacgtgcctgccaaccttgccatccatcgccatgacgggtactaacattatgtaaatcaagatttttcaggcggcgacgtgcctgccactgcaagcctttaatccgttcaacgctgcaaacatgctggacaagatgcgccaggattgccgtttgatatccgctaccggtgccaatttccagcacccggctctgcggcgtcagctcgagtaattcggtcattcgcgccaccatatatggctggctaattgtctgcccctgacctatcggcaaagcgatattgtcccaggctttttgttcaaacgcttcatcaacgaatttttcacgcggcacggcggcaagtgcattcagcacctgctcatcctgaataccttgcgcacgtaattgatccagaagtgcttgtacgcgtctgcttaccattgcgtgccaactcccacgctgtttaaccagtcactaaccacatcttgcgcgctatgcgcagttaaatccacatgcagcggcgtgatggagacatagccctcatctaccgcagcaaaatcggtccccggaccagcatcacatttaccgcccggcgggccaatccagtacagcgtattgccgcgcggatcttgctgcgggatcacctgatctgccggatgtcgtgtaccgcagcgcgtcacgcgaatacctttgatttgatccaagggtaaatccggaacgttaatattaagaatacgcccggtgcgcagcggctctttacacagtgcgcgcaaaatactacaggttaccgccgcggcagtgtcgtaatgtttatgcccgtcaaggctgacggcaagcgccggaaaacctaaatgacggccttccatcgcggcggctaccgtaccggaataaataacatcatcccccagattcggcccggcgttaattccggacacaacaatgtccgggcgcggacgcatcagagcattcacgccaagatagacgcaatcggtcggggttcccatttgcacagcaatatcaccattttcaaaggtaaacgtgcgcagggaggattccagtgtcagagaattactagcgccgctgcggttacgatcgggggcgaccacctgaacgtcagcaaactcacgcaaggctttcgccagcgtttgtataccgggtgcatgtaccccgtcatcattactcagcaatatgcgcataatcacctgttgtgttgataagttccctgacaacgctggttgcaaaactacccgccggaagccagaaacggatctctacggtgacgtcatcccaccaattccagcttaattgttgcggatacagcagcatcgctctgcgcgcggcttcaactttttcgcgcaccagtaaagcttgtaattcagtttctgcggcgacagctgcttgttcgaatgccagcgcttcacgctgagttccccattcgccactgcctggcaatgcggcggttatcatcaactctttatcgttgacgcgacgctgtaattccgccagttcttcggtggttgcgacaaaccagctaccacgtccggctaattgtagcgcatcgccgtcaacaacttgattaacgtctgcttttttgaggcgctcagcaacaatctgattaaacaacgcactgcgggctgcgctcaaccaaaaactccgtttattgcgatcgcgcaccggagtattggtttgcgcccagcgctgcgccccctgcaagttgctaccgccaatcccaaaacgttgggcaccgaagtagttcggtacaccttttacgcaaatatcgatcagacgttgttcaacgtcatcgcgattgctcacttcgcgcagaaccagggtaaaggcgttacctttcagcgcgcctaaacgcagcttgcgcttgtgccgcgcatactccagcacctggcagccttccagttgaaaggcgctcagatcgggcatttccttgcccggcacgcgagcgcataaccactgttccgtaacagcatgtttgtctttttgcccagcgaagctgacttcacgggcatgaattttcaggaatttcgccagtgcatccgccacaaaacgggtattgcagccgtttttgaggattctaaccagaatatgctcaccttcaccatcaggctcaaagcccaaatcttccaccaccacaaagtcttccggattggctttcagcagcccggtgccttgcggtttaccgtggaggtaagtgagattatcaaactcaatcattttgttgccttaatgagtagcgccaccgcttcacaggcaatcccttccccacgtccggtaaatcccagtttttccgtagtagtggctttcacgttaacatcatccatatggcagccgagatcttcggcaataaacacgcgcatttgtggaatgtgcggcaacatcttcggtgcctgagcgatgatagtgacatcgacgttgccaagggtataacccttcgcctgaatacgacgccaggcttcgcgtagcagctcgcggctatcggcacctttaaatgccggatcggtatccgggaacagcttgccgatatcccccagcgccgccgcgccaagcaatgcatcggtcaacgcatggagcgccacgtcgccatcagaatgcgccagcaatcctttttcgtaaggaatgcgtacgccaccaatgataattgggccttcaccgccaaaggcatgtacgtcaaaaccgtgtccaattcgcattatgtattctcctgatggatggttcgggtgaggtaaaactcggccagtgccaaatcttccgggcgcgtgactttaatgttatccgcacggccttcgaccaactgaggatggaatccgcaatattccagcgcgctggcttcgtcggtaatagtcgcgccttcatttagagcgcgcgtcagacagtcatgtaacagctcacgagggaaaaattgcggcgtcagcgcgtgccataagccgttgcgatcaacggtatgagcaatggcatttttgcccggttcggcacgtttcatagtatcgcgcactggtgcggcgaggatcccccccgtgcggctggtttcgctcaacgccaacaatcgcgcgaggtcatcctgatgcaaacaaggacgagcggcgtcatgcaccaatacccactgcgcgtcgccagcggctttcagacctgccagcacggaatcggcacgctcatcaccgccatctacaacggtgatttgcggatgattcgccagaggaagttgtgcaaaacggctatcgccaggacttatggcaatgacgacacgtttcacccggggatgcgccagcagcgcatgcacgctgtgttcaagaatggtttgattaccgatactgagatattgcttaggacattccgtttgcattcgacggccaaatccggccgccggaaccacggcgcaaacatccaaatgagtggttgccatgttaattcccgggctgatttatcgattgttttgccccgcagactgtgcgcgcttgctcgcgtcaggcaccagacgataaaaagtttcgcccggcctggtcatgctgagttcattacgcgcacgctcttcgagcgcctcctggccgccattgagatcgtcaatttcggcaaaaagttgatcgtttcgcgctttaagtttcgcgtttgtagcttgctgtgccgccacatcatcattgacgcgggtatagtcatgtataccgttcttaccgaaccacaggctatactgtagccagaccagaatagccagcaacagcagcgttagtttacccatcctgccccctgaaaaacggcatcatcatcccatgcatccgaagacgactctacatcctctgttggggataccgcgacaacgcgggcaaatgtaccacatttgtccattgttacgtatacccagggcgtgcagaacataatctcattattagttacggtttgaattatgaacagaggagacgggaaagtacaaattagcccagtagccacataaacagtgcgccaaacataatgcctactgtcaccagggtgaaaacaatactgtagcgtagctttccgtccatcaaactatgcagcgcaatccccaccactaccgcgacgggcatcagcgccagaaagaaaggccaggtgtagataaagaagaacagcgtgttagagccataaatcaacatcggcatcgccagcgcaaataaccaggagataaaaccgaccacggcaccaggcagactccatgtggtttcttcatcctcagtaaggctgtcgttatttgttagtgtaatgttatggctattacgcatatttgatcctgttactttgacgaaccgggcatggaaacccggtggtgtctcaggatctgataatatcgttctgtctcaacagatctaataattgctgtaccaaatttgttactaattgttcaccattgagatgaatttctgcgctttcaggcgcttcgtaaacggaatctattcccgtaaagttgcgcagttcaccggcacgcgctttcttatataagcctttgggatcgcgggcttcgcaaatcgccagcggcgtatcgacaaacacttcgataaagcgcccttctcctacgcgttcgcgaaccatctggcgttcggcgcggtgtgggctgataaatgcggtcagcaccaccagtccggcttcaaccatcaaattcgccacttcaccgacgcgacggatattctctttacgatcggcatcgctaaaaccgagatcgctgcataatccgtggcgaacattgtcgccatccagcagatacgtactgacgccgagtttatgtaacgcctcctccagcgccccggcgaccgtacttttaccggacccggagaggccggtaaaccacagcactacaccacgatgaccgtggtgtagctcgcgttgttgcacagtgaccggatggctatgccagacgacgttttcgtcatgcagcgccattatttatcccccagcaaatcgcgcgcgccccagtgcggaaagtggcgacgaaccagagcattcaattccagttcgaatgcactgaattcagatggcgcagcagttgcctggctaactggctcgtgcaccataccggcacccacggtcacattgctcaggcgatcgataaaaatcagcccacccgtcaccggattttgttgataacgatctaacaccagcggctcgtcaaaagtgagatccacgaggccgatcccattcagtggcaggttttcaacttcacgctgggtaaggttattaatatcaacctgatagcgaatgccatcaacacgcgcgcgcgtcttcttaccggcaattttgatgtcgtaactctgccctggagaaagcggctgttccgccatccataccacatccacgctcgcgctctgcaccgccggtaacgcttcgtctgccgccagcagcagatcgccacggctgatgtcgatctcatccgtcagcaccagggtgatcgcttctccggcaaaggcttcttcgcgatcaccatcaaaagtcacgatccgcgcgacgttactttccacaccagagggcagcactttgacacgttgcccgacttccacgcgaccggatgccagcgttccggcgtaaccacgaaaatcgagattcgggcgattaacgtactgcaccgggaagcgcattggctgagcatccaccactcgctggatctccacggtttccagcacttcgagcagtgtcggaccgctgtaccacggcatactttcactttggcttgccacgttgtcgccttccagtgcagagagcggcacaaagcggatatccagattacccggcagctgcccggcaaaggtcaaataatcttcacgaatacgggtgaacgtctcttcactgtaatccaccagatccattttgttgatcgccacgaccagatgtttgatccccaacagtgtggagataaaactgtgacgacgggtttgatcgagcacgcctttacgggcatcgatcagtaagatcgccagttcacatgtgcttgcgccagtcgccatattgcgggtgtactgctcgtgccctggggtgtcggcgataataaatttacgcttctcggtagagaaatagcggtaggccacgtcaatggtgatgccctgttcgcgctcagcttgcaggccgtccaccagcagagccagatccagcttttcgccctgggtgccgtgacgcttactgtcgttatgcaggctactgagctgatcttcgtagatttggcgggtatcgtgcagcagacgaccaatcagagtacttttgccgtcatcgacgctaccacaggtcagaaaacgcagcaggcttttatgttgttgcgcaatcatccaggcttcgacgccgccttcattggcgatttgttgtgcaagtgcggtgttcatcttaaaaatacccctgacgttttttcagctccatagaccccgcctggtcgcggtcaatcacgcggccctgacgttcactggtggtggaaaccagcatctcttcgatgatttccggcagtgtttgtgcattactctccaccgcaccggtcagcggccagcagcccagcgtacggaaacgcaccatccgttttttaatcacttcgcccggttgcaggtcgatacggttgtcatcaatcatcatcaacataccgtcgcgttccagaaccggacgttccgcagcgagatatagcggaacaatgtcgatattttccagccagatgtattgccagatatcctgctcggtccagttagagagcgggaagacgcggatgctttcgcctttgttaatttgcccgttgtagttgtgccacagctccgggcgctgatttttcggatcccagcgatggaagcggtcacggaaagagtaaattcgctctttagcgcgggatttctcttcgtcacggcgcgcaccaccgaaggcggcatcaaaaccgtatttgttcagcgcctgtttcaggccttcagttttcataatatcggtatgtttcgcgctgccgtgcacgaatggattaatccccatcgccacgccttccgggtttttatgcaccagcagttcgcagccgtaggctttagcagtacgatcgcggaactcatacatctcgcggaatttccagccggtatcgacatgcagcaacgggaaaggcagcgtacctggataaaacgccttgcgcgccagatgcagcatgacgctggaatctttaccgatagagtagagcatcaccggattactgaattctgccgccacctcgcgaataatgtggatgctttccgcctccagttgccgcaggtgagtaagtcgtatttgatccataaccgttcctttgcaataccgctattttcttgccatcagatgtttcgactatagggagcgtaagagaacgaatgaaattaccaattagaatgagtagttccttaacggaataacgatttggcaaagctaatatcaaaaagtgcttaaggcaccggatttcgggcgtttaggaagatttgaaattgttttagcgcagcggcagtttcatactatggcggtaaaaaaatttgcatggtatttaaggactcactatgttttccgcattgcgccaccgtaccgctgccctggcgctcggcgtatgctttattctccccgtacacgccagcagtcctaaacctggcgattttgctaatactcaggcacgacatattgctactttctttccgggacgcatgaccggaactcctgcagaaatgttatctgccgattatattcgccaacagtttcagcaaatgggttatcgcagtgatattcggacatttaatagtcggtatatttataccgcccgcgataatcgtaagagctggcataacgtgacgggaagtacggtgattgccgctcatgaaggcaaagcgccgcagcagatcatcattatggcgcatctggatacttacgccccgctgagcgatgctgacgccgatgccaatctcggcgggctgacgttacaaggaatggatgataacgccgcaggtttaggtgtcatgctggaattggcagaacgcctgaaaaatacgcctaccgagtatggtattcgatttgtggcgaccagcggcgaagaggaagggaaattaggcgctgagaatttactcaagcggatgagtgacaccgaaaagaaaaatacgctgctggtgattaatctcgataacttaattgttggcgataaattgtatttcaacagcggtgtaaaaacccctgaggcagtaaggaaattaacgcgcgacagggcgctggcaattgcgcgcagtcacggaatagccgcaacgaccaatccgggtttgaataaaaattatccgaaaggcactgggtgttgtaatgacgcagaaatattcgacaaagcgggcattgctgtacttagcgtggaagcgactaactggaatcttgggaataaggatggttatcagcaacgcgcaaaaacacctgccttcccggcgggaaatagctggcatgacgtaagactggataatcaccaacatattgataaggctcttcctggaagaatagaacgtcgctgccgtgacgttatgcggataatgctacctctggtgaaggagttggcgaaggcgtcttgatgggtttgaaaatgggagctgggagttctaccgcagaggcgggggaactccaagtgatatccatcatcgcatccagtgcgcccggtttatccccgctgatgcggggaacaccagcgtcaggcgtgaaatctcaccgtcgttgccggtttatccctgctggcgcggggaactctcggttcaggcgttgcaaacctggctaccgggcggtttatccccgctaacgcggggaactcgtagtccatcattccacctatgtctgaactcccggtttatccccgctggcgcggggaactcccgggggataatgtttacggtcatgcgccccccggtttatccccgctggcgcggggaactctgcgtgagcgtatcgccgcgcgtctgcgaaagcggtttatccccgctggcgcggggaactctctaaaagtatacatttgttcttaaagcattttttcccataaaaacaacccaccaaccttaatgtaacatttccttattattaaagatcagctaattctttgttttcaaacaggtaaaaaagacaccaaccttaaaccatccaaatctaccggggtacgcctgtttaacccaaatgtctggaactcaaatcccgtttccgtattcgttgcccatgccatcactacattgccttcttccgccagtccagctatttgttcccagatcatttcacgaatttttgcggatacatcacctacatatacccctgcacgtacctccaacaaccagatggctaatctgcctcgtaagcgcggaggtacattttcagtgaccacgaccaacatactcatttcagctactccgatggcctgcatctcccagactaacaggaagcggaatggcaacaggctgtgcatcttcaggtggggccggcggttgtatttctccagcggcaagcacgtcctctataagcggaatcaatttggctaatgttttactactgcgaaaaatatccctgcacgccaaacggacttcccggtccggctcaccagggttacgacgcgctatctcaaaagctttcggtacaacagtgtcaaatttaatgatgtctgcaatatcgtaaacaaaggaaagaggctttcctgtatgcacaaacccaatagctggtgcataaccagctgcaagtatcgccgcttcagttacgccgtataaacaggaagttgcagcgctaatgcattggttgatcgtatcgcccttttcccagtctttcggatcgtagcgacgtccattccatgtcacgccgtattgcttcgccagaagtgcgtaggttgcccgcacgcgactgccttctatacctctgagttgctctacggagcgccgggcaggcgcaggttctccaaaccgaagttcaaacattttacgtacgaccttcagacgcaaatcttcatccagagcaagttttgcctgatagagcagcttatcactacgcgcacctccaggctgaccagaagcataaacacgaacgcccgcttcccccacccataccaacaatgttccaacttgcgcagccaggcgtacagctgcatggctaacccgtgtaccaggttccagcatgatgcaggcaacgctgccaacaggaatatgagtgcggatccctgtcttgtcgataagtacaaacgcgccatctattacatcgatctgcccatattgcagaaagatcatggagacgcgatctttgagtggaatgggattaaggggaagccaggtcattttattacacctcaatcacagtggagccaaagatagcaagccacatcccatgcttttagctggcccaataccttgctgtacaagatctattaacgctggcgcgtcgttgatggtgagcacaccttcaaagcaaaccgtttggatctttccacttttaccatcaccagaaaaatactgtggccgttcgcttatgggatgcacatcttcaacgcgcgccgcattgcccaatttacgttgcaaccacgcgatttgttctgcttcttttattaacggaacccgacagcgtttaatattccctttactgtccaggcgcttttgattgtcgagaatagttttgatcggatttgcccgaagccgaaaatagagtggaacaccaacctgaagttgaaattcaacctgtttagttttaatgactgtcgcaacggcagtactaacaggcatttgcgcactctgcaataaaacatgacagccttctggtgtgtttcgcttctcaacatgaaaaagaaaatcacgagcagcatccggtctgtttggaaataaatgccataatccctggtgaagttggtaaagatccctgctccaggccctggcaatgatgactttactgagatacatccatacctcctttaatcacataccattctcgggaagcaaattgtcgaggcaaggtgatcatcggttcgtcgcgcgccgtaaattttaaatgatgccctgtaacactttcctcactatatatatcgccgccaacgggctcataatttaatagcgccttctgaggatcgcttgcctgacatgtccccaaaaaaagcgggtgtgttagtgggcaacttctccgccccaggtaaggtgtataccgaggctttaatactgctttttcaagttcactgataaccatcgttgcatggggtgttaaccagagagcgacggtaaaggaggcatcacataaatattcgcgccatgtttgaatcgtttcatgacttttcaaaccacggtaatcttctcgcgctccaaggactgtatggtaatcacgcaaccccgttacagacacacgacgatcgtcaagaatgagttcatcgcagcgcactgcaaattgcacactctcacttaacgcctgtaaactagaagtatcatcacgttggatcccaagacaagccccgagtagccctaataacccgcttcgggtcggaaatcttccggtaggtcgcgttccttcaaaggtcggctgcccccaggcttgcattggcccagcaagccgcaagatcaaataagatctcatgttcacgcctcgccattattacgaacccaggattttaactgttctaaagtaggcatttgtttaacttgagcagtaattgggtctacatcagataagctgaattgcgcagcagctccgttcagaccatatccattggcaacgcgatcccaatattgattaaacgcctgtatagacggttgcaaaaagccatctttcgctttaaccgctttttcaaaagcatttgccatagaaagtggcatatcggagaaattaaccattaccatatccgcagggttaaaagcggcataagtacgctgttttgctccagggacctctgttgccagcatatgaacaacatgggttgcaatttccagagcctgctccctggaggcaccacctaaattttcctgaagttgagcgaggttaatgttggcataacgataaaaaacaccgctactaaattcctgagttcccagatgtgcagaaccttgttcctgtaaatcatctacagcggtgaaccagtcaatatcagaatcaacctgatgagtagtgatcgcatgcgcaatggacattgcaccatcaacttttcccaactcagtcatcatgccgctggttgccattcttccactaagcgcaatatcaacaccctgctgtaaattcacacgtatggcggcaatatcttccttaagaactttgagcagctttttatcatccagattatcagcctctgcttttgcaacctgctcacagaaccaggctatttctcccacaacccagggagtaaccgcatcggcagaaatcttttcggcttcatcaacacttttaccggagagcagcgctaatgtcttatcgatgattttttggtcaaaacgttcaccaagtttttgccgaagaacatcacgtaattgtgcaagatgaatggttctgagactggattcaccaatattttgtgcgtaataaccacttttacgcatcgcacgtttaaggctttgactactaattcttactcgtcttttgccgccgaaaatagcgtctttctgcatgttcatatcgtcgcggttcagacaactagggctgtgagagatcagaacatgaatattgataaagttagacatagaaaggtttccttacgcatttttgtttgtggtcaatacaaaatcttccagaagttgctggcgttcgcgctttccccaccaggtcaacatcctggccattaatggccagtcaagtacgggttcggcgtgagtaagtaatcgacgtaactggaccatatcggctgttctgtcagcccgaattaattgaaagatacggcgctcgttaattcttccactattggctaaagctcttcccaagctgatacctgttgtttgctcgctttttttgtcctgatgtcggatgacattctttcctgcgctcaggcaaaacaccatgcgcaaaagagcctgctggtgacgtgggttttcccaaccaaaaggttgcaccagcctataaaacgcagggatatcgcgtaattcatcaggttcactaacacgtctaatttgcgcacaacttccattatccagttgttgccaggctcgatataaagccattgcatcaatttcatcagccattacttggccctccttgcggttttaactcccgtaaatgtttgtatagcgtggcgcgggcaagcgctaatgtgcttattaatttaggatgatgtgcatagggagctacagattgattaaatagcatttcacacaattgatgaagtttgtctcgtaaatcagctattacctcatcagcctgggaaaaattaacattcgccagtacatcgggaattaataattcactctgtcgatagaaatgcctttctgcagtctcatgaacagagactccggcccctttgaagtctttatttttaaacccttctgcaaaggtatataacgccttgcgtaaggctgttttatatcccaaaccaacagtcactatttcgtttatcacattgccgtattgttgccacccctgattaaacatcaacacatcatgacgccgttcaagaatagatgcttgattattacgatatccccccataatcaattcaagaggactttgcggcgcaatatttctgaattgattcacaaccgccgccacgcgatttccattttcattttgaataatcttatctaccacaactcggctgatttgtgtccaacttggtgcggaggtggtgaaagcaagaaatttttcctcaacctcccctttcttgactgttaccagacaaggggaatgcggatggggccatagcccattaactgtaaaggtaaatttttccttaagaaaaccggtataacgcaaattgctttcctgtccacagcaagaacatttaccaatcccaatgggatcgcataattcaatatgcgctggttgccagaatagaccacggacaaacccaatactgctagcaggtatagactcattggacttgataggtttaatccaggtaggttggttttccgtatgactttcattaggaaattgtttttgaagacgaggtaatgtgaggacattgagtaacaccgtactacgaagatcgatcccacgtacgaacgttgttacaggtgttcctccacgtaaaccgcttttaaaaccaccaccaaaacctggtgcctgattcgcctggttgaataacgcaatcgcagtgcatccaccacataatgcttcaccctgccccggttgattgacaaatgcacaattcgtcgcgccgcttaccccagccaacagtttttccattggagtcacatcatttgctttgacacctttggtctgcataaagggatgttctgcgtgattaaggtagaacatatctatccacggcgcgatgagttgttgaaactcatcttcagtgagcggattcattatgcgatgtcgaaattcaacgtcatcttttgccggggcgataatttgcccaatgcaaaccagcagtgctaaagcggccagttccatatcgtcacggggcaaacttaatcgccactgatctctactgcagtataggctttgcagatttatgatttggactttccccccgtttcgcgggcgtacagggatccagttatcaataagcaaattcatttgttctccttcatatgctccgacatttctcctgcatttctatacgtcggcacacttccgttatcggtaaaaacaaagaaaaaatacggcgtaattaattcaataatcacattcactgcaaaaatatattcattggtttaatacaattaacctatacatatattaagatgtgttgaattgtttaaagacaataatgcatgcatttcaaatctgcaagttattcgttttattattaaagaaacttttagttataataattaccatgaattttattacataaaatattcatactgtgaatataaaatctcataccgggaaattaaaagaagatgtacattgtgcaccttccctacttaagtagggataaaccgttattggtcttattatcgtcattgataacaatcattcccgaagttatttgggatttgcagggatgactctggtcatcccttcatcccctgtataggtaataacaatactgttaccctgccagacccatccatccagattctgtttcccttccagccaaagtaacccatcttcatctactacttcagaaaaactacgtttccaggtgaagggtacattgacgcgattaagtgcaagcgcctcatactgctgttcatgacttaggtcctcgtagacctggccatcgagcagttgtttaccactagacgtttgtacataaggcaataatggcaggctcatttccccatccctcgttaccgcaagaatggtttcatcgttatcctgcaagctatattcttcagcccactgcaggaccttgcgagccttgaaccttttttcacactcggcgctttcaaatttatccatgccattgccgacccattctggctcatccatttccgcatcatcgtaaatgctatccagccattgccggtaagcatcagggaaaaataaggatgctccattaagctcctcaatatgttgctgcgtccgccacatgactctaacgttgctataaatatgctcatgtcgtccgtaaccctcgccatcaggcagcaaaatggtggcaacaggaatctcaaaaccagcgggacgatatttgcgatgatggcgatgtaaacggcccaatcgttggaaaagcaaatctgcaggacaatgctgagtaattaaccaatcaaaatcaacgtcgagactttgttccacgacctgggttgcgacaagtatccgtccaacatttcgcttcccatttttgccgaaattgctaataactcgattctctttttcacgacgatcgttcagcgtaaagcgcgcatgaaacaaatctatatctacttgcgtgttatttagctcctttagccgttggtagcatacttgtgcaacgtcaaccaaattgcaaataagacagacctgtgcacccgcgtttgccgctgcgatcattcgctctaacatcgtaaggtcaggtaacatgtcagctaaacaaataggttctggctgaatgctaaagcggggcgggagttgttctggatgagctagcagatcaaaacgttgcgcaccattcacacctcgccagttaatgagtggatatgcggagttattttccactggatctgtatgcagaccataagtatccagaagtttctgtttttgtttcattggtagggttgcggaaagaagaataacactccctcccacatcagcctgagccttgagcactgcctccagcaagccgttcatataggtgtcgtaagcatgaacttcatcaacaattaaaacacttcgaccaattcccaaaccacggataaagcggtgtttaactggcaatacgcttatcaacacctgatcaatcgtgcaaacgccgatttgcccaagaaacactttcttattgctttgactcaaccactgacaacactgaacccacgcttcttcttgcccctgttcagtaatcgcgcgactttttatactttgaaagaggtggttaaaccgactattgccatgagcaagaataagatttggggaactaaataagtggctcgcgctcgcttccattctcgtaagcatagcattcgcggtagcttgtgttgggagggcaaaaataacactatccgcaatttgttgatcaataagtttccaagcataggccagcgctgtttccgttttaccggagcctgtaggtgcctctattaccgtcagcccgggagctactggaagagcatcaactaacacctgtaattgtctgggttgatagccattgtccagtagtgcatgaacaccttcataacatcgcttattacttacaagtccactcaactccaatacccggctcgcatcctgctgtcggtcctggaaatacgttctcagagcatttatgtcggaaggcgcatcctcattaaacagaaaggtattcgttgtagtccaggagcctaaccagtcagcaaggctgcaaaaacctgctaacagactactacaatcaggtggtatatcgtttatagataaccccgctggcgttaaaaataatgcttccagtacagatatccactcctcacgagcctgtttatcttgcgcagcataagatgccagagaagctggcatttcccaacggctcttatcttgatcctgggaatgtaatataaaaccatgatgtcctgtaacggcctctacccatggaaaccaggactcataaggatgaggagcggcatcaaaaaaactgaaaaaatccccgagagattgctcactaagactatcctggttaaaccaatacagaccggctgcaccatgattaaatttacggcacatttgtgtacttggaccattaagacttggcgttgcaggatttaatttcagccaactttctgcacttttatattggaatcgtatatcaaactttccaatatcatgaagagcaatgaaaaataacagccaggccttcaccctctgtttacttagcatttcatttcggcaaaaagtattttgcagtacgacactttgatcccaccagcaatctgcaacagcagcaacatcaaggcaatgataaattaacagatgaatatcatttcctttcgtcaagcttttactggattttccccagtaatggcatatatatttaaaaggttccattaatagcctccctgtttttttagtattatcgatgatatcagcgggctatttttcgatgctgctcataaatatcgaattacagtgatatacacatgtcttgcctccctgcaaagaagagactaacattcgaattgtttgggttcgaacgctggcctcaggttgatagaaatatcgcctggggcttttgtccatctggaacctcgcgaatgcttaacgccagacagcctcaagcacccgacgccattctatacctgataattcttcccgcggcgttcacgtttaaaatcaggaatgctgctcgcaaaataaaaacgcccccatcatttctgacagaggcgtttaatttgtccggcaatatttacccttcgtgtaacccacattccctttttaagccaaagaaacgcgtttcttcttccgccatgccgggttcccatttacgggttgtatgggtatcgcccacgcttaaatatccttcatcccataatgggtgatatttcaggccatgtttttgcaggtactgataaatagttcggttatcccagtcgataatcggcagcactttaaatacgccacgctgaattgccagcaccggtaaattggcacgactgccggattgttcacggcgcaggccagcaaaccaggtttgcgcattcagttctttcagagcccggttcatcggttcgactttgttgatgtcattgtacttttcaatgccttcaacgccctgctcccacagttttccgtagcgtgcttcctgccaggctgcgctttcggtagcacggtacactttcaggttgagcttgagtttgtccgttaactcgtcaataaagcggtaggtttccgggaacaagtaacccgtatcggtgaggatcaccggaatatccgggcgaatttgattcaccagatgcaggctcaccgccgcctgaatgccaaagctggaagaaagtacatattcaccgggcagattatccagcgcccaggctacgcggccttcagcgtccagtttttccagttcggcgttagtttccgccagcgccagaatgcgatctaccttcggcagttcgttcagggcgtttagatcgagtttggacatagattcctcactgtttgccttgcctgatgcgacgctcacgcgttcttatcaggcctacaagaccgggctgatggttaatcccacaaatcacgcgccggatcgagcaccgggcgaatgatgcccgcacgcaccgtaaagtcgccgaagccttcacccgcttcgcgctctttcgcccagcgccctatcagttcatcaaggctcgccaggatttccggctcggtgatgttttctttatacatccgtgggatacgtgtcccaatgcggttgccgccaagatgcaggttgtagcgacccggcgctttacccaccaggcccacttccgccagcatcgcgcgaccacaaccgttcgggcagcctgttacacgcatcacgatatgctcatcgctgacaccatgtttcgccattaaattatcgatgttgtcgataaaagacggcaggaaacgctctgcttccgccatcgccagcgggcaagtcgggaaactcacgcaagccatgctgttttcacgctgcggcgtgacggcattcattaacccgctctctttggcgatcttctcgatcttcgctttctcgctttccggtacaccggcgatgatcagattctggttcgccgtaatgcggaaatcgcctttgtggatcttcgcgatctccagcaggccggttttcagcggacgcgccggataatcaaggatgcgaccattttcgataaacagcgtcaggtgccagttatcatcaatgcccttaacccagccaatacgatcgcctcgtccggtgaactcatatggacggatcggttcaaatttgatccccgcgcgacgctccacttccgctttaaacgtctcaacccccacgcgctccagcgtgtatttggttttggcatttttacgatcggttcggttaccccagtcacgctgagttgtcacgacggcttcggccaccgccagcgtatgctccagcggcagatagccaaactcactcgcggtgcgggcgtaggttttcttgttgccgtgttcgatggaaagcccaccgcccaccaacaggttaaagcccaccagcttgccgttttcggcgatcgccacgaagttcatgtcgttggcgtgcagatcgatatcgttctgtggcgggatcactaccgtggttttgaatttacgcggcaggtaggtctggccgaggatcggttcttcatcagtagtggcgactttttcctggtcgagccagatctccgcatacgcgcgggtacgaggcaacagatgctcagaaatcttcttcgcccactcgtacgcttccgcgtgcagctggctctcgtaagggttgctggtgcagagtacgttacggttcatgtcgttagctgtcgccagcgcatcaagaccgacgctgtgcagcatctggtgcaccggtttgacgttctttttcagaatgccgtggaactgaaacgtctggcggttggtcaggcgaatgctgccatagatggtgttttcaccggcaaatttgtcgatcgcctgccactgtttagtggtaatcaccccacccggcagacgacagcgaagcagcatcgcgtggcgcggctccagcttctgttcagcacgttcggcgcggatgtcgcggtcatcctgctgatacatgccgtggaagcgaatcagcaggaagttgtcgcccttaaagccgccggtcagaccgtcgtttaaatcttccgcaatggtgccgcgcaggtagttgctttcatgcttcatgcgctcggcgtctgtcagttttccttcgaccactaaaggccctggatgtttttcgctcattagtagacatctcgctgataacggcgctctacgcgcagctcacttaaaaattcatccgccgcttcggtgtccatgccaccaaattcggcaatcacttccagaagtgcctgctcaacgtctttcgccatgcgattagcgtcgccgcagacataaatgtgggcaccatcattgatccagcgccacagctccgcgccctgttcgcgcagtttgtcttgtacgtaaactttttctttttgatcgcggctccaggcaagatcgatacgtgtcagcacgccatctttgacgtagcgctgccactccacctggtacaggaagtcttccgtaaagtgcggattaccaaagaacagccagtttttacctggcgcttcgtcggcggcgcgttgctgcataaaggcgcggaacggcgcaataccggtgcctgggccaatcataatcaccggggtttctggattggctggcaggcggaagttatcgttatgttcgataaatacgcggacttcgccctcttcttccacgcggtcagcgaggaagctggaggcaccaccggcacgggcgcggccttccacgtcgtaacgcaccacaccaacggtgacgtgtacttcgttctcgacttccgcctggctggaggcgatggaatacagacgcggcgtcagcgggcgcagcagattaattagcgcttcggcatcaagctgtgccggggagaaacgcaccatgtcaacaatcggcgtcgtcgcggcgtaatgctgtaacttcgctttatcgcccaccagcggcagcagtgtttcactgcgggtaagcgtggcgtaattctcaacaatgttggcggtgttgacggtcagttcgaagtgccactgtagcgcttcgttcagaggcaacgttttgccctcgacggtgacaggttcatcgcctttcagccacagcagttcgacaagttctttcaccagtgccggatcgttctgataccagacgcccagcgcgtcacccggctggtaacgcatgccgctgtcacctaagtcaatttcgatatggcgaacgtctttttcagagttacgcccggtaattttctggttaacagagaggctagccaccagcggcgcgtctttgctgtacgggctggtgtggatttcatttaccgcgccagtagcgacggattggctaggtgccgcgacaggcgcacggcttttaagcgcatcaaccacgcgggcgcgccactcgctggcagcagcctggtattcaacatcggcatcgacacggtcgagcaggcgttcaccacccagttccgccagcttgctgtcgaaatctttcccggactggcagaaaaattcataagagctatcgccgaggctaaacacggcaaacgcggtgttttccagctttggcgcttttttggagaacaggaacttatgcagcgcgacggcttcttccggcggttccccttccccttgcgtactcgtcactacgatgagcagtttttcgctggcgatttgtttgaatttatagtcgcccgcgttcaccagcttaacgttcagttttgctgctaataaatcatcacgtaatgcttcagcaacccggcgcgcattgccggtttggctggcggagataatagttatacccggcatttctgcggctggcgctggcgtcgctgcaagcgcagcaggctgctgattgagtacgccccagaaatagccagaaacccaggcaagctgggtgggagttaaatcggtcgtggccgcctgaaggcgtgccagttgctccgggttcaacggaagcaacgcggaaggtgggacctgtgtcgtcatgcgtcgttatgttccagtaagcaaagctgtttctgcgccctgtcagcgcccataaaacagaagagaaggtaaggttaacggggcaaacggtgtggattaaagacgggatagcgataactaataaccaaatcgactaacctgttttagcaatagtctttaacaacaaaatagattaaccaacctaatgaaaaacaaatgaatttagccaatcattaagataaatcagcgattttgcgcaacaaagtcgttttagataatgcgaaaaaacagcctttccggtactctacggcggttttatcgtcctgtagagaaattatgatgtccaccacgttatttaaagatttcaccttcgaagccgctcaccgcttaccacacgtcccggaagggcataaatgtggtcgcctgcacgggcattcctttatggtgcgactggaaattaccggggaagtcgatccgcatacgggctggattatcgatttcgctgaactaaaagcggcgtttaaaccaacctacgagcgcctcgatcaccattatctcaatgatattccaggtctggaaaacccaaccagcgaggttttagcaaaatggatttgggatcaggttaaacccgttgtgccgctgttaagtgcggtgatggtaaaagaaacctgcaccgcaggttgtatctatcgcggcgaatgataagagtgtgtcggcggtcaatttcccttaagtaacgctatgttagggtgttgtgttctggatatctggggcatgacatggaagacgactgcgacattattattattggtgccggtattgcaggcaccgcttgcgcgttacgctgcgcgcgagcgggtttatccgttttgttactggaacgcgctgaaatccccggcagcaaaaatctttccggcgggcggttatatacccatgcactcgcggaactcctcccgcaatttcatctgaccgcgcctcttgaacgacgcatcactcacgaaagcctttccctgttaacgcccgatggcgtaacgacgttttccagcttacagcccggcggtgaatcctggagtgtattacgtgcacgattcgatccgtggctggttgccgaagccgaaaaagaaggtgtcgaatgcatccccggagcgacggtggatgcactgtatgaagaaaacggcagagtctgtggcgttatttgtggtgacgatattctccgcgcccgttatgtggtgctggcagaaggtgccaacagcgtcctggctgaacgtcacgggttagtgactcgtcctgctggcgaagcgatggcgttggggatcaaagaagtgctgagcctggaaacatccgctattgaagaacgttttcatctggagaataacgaaggcgcagcgttgctgttcagcggcaggatctgtgatgacttacccggcggcgcatttctttatactaatcaacaaacgctcagcttagggattgtttgcccgctctcttcccttacgcaaagtcgtgttccggcaagcgagctgctgactcgctttaaagcgcatccggcagtgcgcccgcttatcaaaaacacggaaagtctggagtatggtgcgcatctggtgccagaaggtggcttgcacagtatgccggtgcaatacgccggtaacggctggctgctggtgggcgatgcgttgcgcagttgcgtcaataccggaatttccgtgcgcggcatggatatggcgctgactggcgcgcaggcggcggcacaaacgctgataagcgcctgccagcaccgcgagccgcaaaatctgtttccgctttatcatcacaacgtagagcgcagcctgctgtgggatgttctacagcgttatcagcatgttccggcgcttttgcaacgcccgggatggtaccgtacgtggcctgcgttaatgcaggatatttcccgcgatttatgggatcagggtgataaacctgttccaccgctgcgccagttattctggcatcatttacgtcgtcacggcctgtggcatctggcgggcgatgttatcaggagtctgcgatgtctgtaacgtaagatgttatcaggagtctgcgatgtctgtagcccgtaatctctggcgcgttgctgatgcgccgcacattgttccggctgactccgttgagcgccagacggcagaacggttgattaacgcctgtccggcaggtctttttagcctcacaccggaaggtaacttacgtattgactatcgcagttgcctggagtgtggcacctgccgtttgctgtgcgacgaaagtacactacaacagtggcgctatccgccttccggattcggcatcacctaccgctttggataaataataaggataatttatgcccctcttacacctgctccgccagaatccggtgattgctgccgttaaagataatgccagcctgcaactggcaatcgattctgaatgccaatttatttccgtgttgtacggcaatatctgcaccatcagtaatatcgttaaaaagattaagaacgccgggaaatatgcttttattcatgttgatttgctggaaggcgcgagtaataaagaagtcgttattcagtttttgaaactggtgaccgaggcggacggcattatcagtaccaaagccagtatgttgaaagcggcaagagcggaaggttttttctgtattcatcgcctgtttattgttgatagtattagctttcacaacattgataagcaagttgcgcaaagcaatccggattgtattgagatcctgccaggctgtatgcccaaagtgctgggctgggtgacagagaaaatccgccaaccgctgattgccggtgggctggtgtgcgatgaagaagatgcgcgtaatgcgattaacgcgggtgtcgtggcgctttccaccacgaataccggggtctggacgttagcgaaaaaattactttgacgggataatcgtaaccaattgaatttggtttgatttgtaggccgcacgccacatccgacattcagcgcctgatgcgacgcttgacgcgtcttatcaggcctacaagtccccaggccagaaccgtaggcaggatcatccggcaacacgttattggcaatctgcgtgaatgtttgtcaccagtgcctccagcaccactttccagtcatcaaccacgccaacatctgcctgactaaataccgcagcgctggcgtcatgattaatcgccaccacaaacttgctattgcgtacgcccgccattaacgctgctgcgccagaagcgccaacaacaatacacacctcaggtgccagcagatgtccggaaataccaatcactttttcagcatcaacgccaccgttcatcactcgcgcccgactgtagcccacttcggctcccagcttttctgccagcatagcgatttcctggttatctgcctctccgccctgccccaccaccagcacccgtctggcctcagctaatgggtcgcgggtaacatttttcagatcctctgtgctaaccagccagtccggaagcgcacccgggacaatgttcagttgttgcattccagagggcaacgtggcgtttttcgctgctcccgcctgacgcgccagggaaaggcatagcgggcgtttttctgtttgcagcgtcgccgttagcgcatttccccagtgggatttgcgcacgcttacggttggaatatctaagctagtcacctggcagatgcttgcaccatgtaaacgccaggccagccgggtgctcagttcatcgccaaacgttcccggcggaaagagaacaacgtccgcaggcgttcgctgccactgttccaccaacgcatccagcacctgttccgccactacaggctgaggttcaatctgccagtgcgccagggtacaaccgctgaaatcctgcgccgccagccagcttgctattgcggcattctcctgatttattgtcacaattgcgatattcatggctgcatcctttggcgtaaatagtcctgccatagcttttgagctttttctgctaccgtttgcccatcaatcagcgtcgctccgcgtcgttgctctgctcttgccagttgcagacactgcatcgctggcatttcggcagcaacagttttacggataatttctgctttccccgcagccattcgctggcgcattcccggtactggcaaggccacttcaccgcactgacgcacggcaatcaccgcaggcaagcgaacccggcaacaacgcaacccatgttcagtacgctgttcgagggtgataaacagcgcgtcgagagtgaaacgctccacctgggtgaagcagggccagcccagcatttccgccagcaaaaatggcgtttgcccattctgcccttcgctgctttggcagccggtaattatcagatccagcggattctgatgctgccattcggcaatatggcgagcgacaaattccggcgcaaagcgcagatctgccgccgtctccagcaatacagcttcctcaaacccaagagccatgagatagcgcagccagtgcaatgcccgttcatcccccatgctcaacgcggttaaagacatcggcgtaccgttttttctctgcgccaacagcagcgcggcagcggcctgttcatcagcaccgagtaaacttcgcagtaggctaatatccggtccgcttttaccctgagccgccgcctgccactctttttccgccagcattccggcatccggttcggctttaaacgctaacagaatgttcattcgcacctcctacatttcccgccgccaccagcgggagggctttagtttctggtgcccatagccaggtcacaacaaaaccaaccaacaacactgtcgccaggagcaataaggtgacttgcattccccactgcgccagcacccacggcagcaggccagtacttaccgccgcgccaagtcgactcatggcagtggcaaaaccgacgcccaggctgcgaatgtcagtaggaaaactttccgcaggcaaaatgcccaccagattactgactgcgctaatggtggtgctgaagagaacaaaaagcagcagcgttaaactactgccggaaggcaaacaggccatgactaccagcgttgccgccagcagcaaaaaacttcccagcaaaaatttgcgatgtgccagcaggtgcgtcagaactaatcccagcagcgcgcccacaattaacaacgcattaagcatcaggctggcagtcagcgcatcttccagaccaatagtctgggcgatagttggcagccaggtataaatcacaaaccatgggattacgaggcagacaaagaagacgctgttaaacgccgtgcgccgccagtaacggctagagaacaaggttttgatgtgtttatgggtcgccgttaccacttcatcgcccagtaaaacatggggaccaaaatagcgatgcacgatagcgtgagcttctgcaaaacgcccctggcgcagtagccagcgtggactttctggcgttccccagcgtaataacgtaatcaacaacgcgggcagagctgcgcttgccagtagccagcgccaggcctccgggttttcggaaataaagtgatgtccggcaatacttgccagcacatagcctacggtccacaccacgctgaatgcgcccagcaaaataccgcgatggcggcgcggggaaaattcagccagcaaggtgtgacctacactataatcgcctcccagaccaatgccaatcaaaatgcgcagtccaataagatgctctggcgtggtggcaaaaaattgtaaaaagctagcaagcgtaatcagcaaaaagctgaaggtgaagattttttgccgaccaatatggtcggagatccacccaagaaccaggctgccaaggaacaaaccaaggagcgcgctgccgccgatcattcccgccataaacggcgtcagttgcatggcgggcgtaagctgaataatggcgtaaccaatgacgccgagaacataaccgtcggtcaggtgtgcgccgaaagtgagcgcagcaatgcggcagtgaaaacggttaagcggtaaatcatccattcgcaccggactagtgttcatctttaccccttcattgtccggtaataagaacggcttctcgcctgagaagccgaaaaggcaacgccccgtcatcgcggaacgctgcctgacacattatttttcaatcggatagatagtacccgtattcataatgccattaggatcgaactgctttttcagcccttccagcaacgcccacgcgctgccgtgttccagtttgctccagtgaacgcgatgtttaccgataccgtggtggtgcaccatgctaccgccgaggcgaatggtttcttcacagatgatcttgttgagcggattgtggtacttgtcgatttcctcttccggcttacagtcaacgacgttgtaatcgtagacgaagtacatgttggtgccgttctgatagctatgagaggaatgaccgcccagcatggtgatgtcgtcggcgtgcgggaactcagtacgaatacggttaataacgctttcgtagatttcgtggatgcagctccagcagccggatacttcggtggtaaagcccatgttgccggttttgaggatctgcacacgttcggcagccactttatccggtccccagttcaggttgttaaaccaggtttcgatcagcttgctgtccacgcgctggcattgcgggtagcgggcaacgatttccgcaatcccttcgcccgtcaccttcgcaatgcgagggttaccttcagccataaagatcagcacgcattttccgtcggcaaaatgggtgaagtgttgggtgccatcttcagcgtcatacaaacgagcgatactcggacgatacccttccaccatgatttcacgcaggatgttgaagccggttttcatgtcttccaggatatagccgtagaagaggttgttttccggggtgaatttaaagattttcactgttacttcagtgatatagcacaatgcaccttcgttgccgatgatgatgtgacgaatgtccgggccagccgcgcggcgtggcacgtttttaatgcgtgtgacggtgccatcagccaatactgcttccagaccaacgaccatatcttcgattgcgccgtagagtgtggagaactgcccgatacttcgggttgctaccaggccgcccatctgcgccagcggcttactctgcggagaatgccccgtggtgtaacctttttcacgcaacgcgttttccagcacttccagcggaacaccacattgcgccgtcgcctgcatattctcaatatcaatattaatgatttgattcatggcggagccgtcgagcaccacgctgttttctacaacagtttccagcccaccttcggtggcggaagcaccggtacgcggcacaccgttaattttgtgcgcattcataaaattcagcacacgggatacttgctctgtggaaccgagttttacgaccgctgccggaatcggcaaagtataaatgccatgaatatccggaaatttacgaaaacggtcaatactgtttttctttaatactgtttcatcggtaattacgcgatctgcaccaacaatttcctttagctggtcgacaatcgctgcgcgagataaagacatagtaattccttcctgataataaaaatggaataatcattaataagagaaaacagaaaccaccgttatgggttagcgcactaaataaccgccatcaaccactaataaatgcccgttgacataattgcttgccggacttgcgaggaatacggctgcgcccattaaatcctgagtatcgccccaacggtttgccggaatatgatcaagaacgcgctgattggtttctggattactgcgtgtcgccagcgtaatatctgttgcataatagccaggggcgataccatttacctgaatattatattgacctagttcatcacaataagctttggtgaacccggcaagagcatgtttagtggcagaatatgcaggactccattgtccacctaagtaagagaacaaactacagatattaataattttgccgcttttctgcgggatcataatttttgcagcttcatagcttaactcgaatgcggcggtcaggttcacatcaatcatcggatcccagtcggcacgaccgaagtccagcaccttattcagcttacaaataccggcattgttaaccagaatatcaactgtaccgaaacgctcacagcaagcagcgataatcttctgcggcgcgccttctgcggtgatacccacctgcatgaagtccacctcaacaccctgtttttcaatcatttcctttgtttcgccgttatctttgacgaaactaggaataaagatatttgcgccagctttggccaacgccatggcaaatgcctggcctaaaccgctattcccaccggtaacaattgcggttttacctttcagggagaaaaaatccatactgaacgcattgagagattcgatactcatagttagctccaatttccgtaaggcaaaaaaaaagaaaggtaacttcccccgcgagagggaagttacctttctcattatctctggtaactggagataatttttagcataagggcataactgctaatgtgatcgtaatcacagtgtgatattcgtattgtcaaataattttaaaaagcagaagcgtgattactctcacacaacacctctgctttccatgttatttattatttcaattactagagacctgagaaaagtaatccacctgaaagggcggcttacttttctcttttttttgtctattacaaatgggaatacgatatgcaacacaacagttatcgccgttggataaccctcgcgataattagttttagcggcggcgttagtttcgacctggcttatttacgttatatttatcaaattcccatggcgaaatttatgggattcagcaataccgagataggtttaataatgagtacctttggtattgcggccattattctttatgcccccagcggcgttattgccgataaatttagtcaccgcaaaatgattacttccgcgatgatcattaccggattactgggtctgttaatggcaacgtatccaccgctgtgggtaatgctctgtattcagatcgcctttgcgataacgacgattttaatgctgtggagcgtgagcattaaagctgcaagcttgcttggcgatcatagcgagcaagggaaaattatgggctggatggaagggctgcgcggcgtcggtgtaatgagcctggcggtgtttaccatgtgggtcttttctcgctttgcaccggatgacagcaccagcctgaaaacggtcattatcatctatagtgtggtttacatcttgttggggattctgtgctggttttttgttagcgataacaacaacctgcgcagtgccaataacgaagaaaaacagagtttccagcttagcgacatcctggccgttttgcgtatcagcaccacctggtattgcagcatggtgatttttggcgtcttcaccatctacgccattctgagttactccaccaactatctgaccgaaatgtatggcatgagcctggtggcggcgagctacatggggattgtgatcaacaaaatattccgcgcgctgtgcggcccacttggcggcataatcaccacctacagcaaagtgaaatcccctacccgcgtgatccaaatcctttccgtactcggcctgctgacgttaactgccctgctcgtcacgaactctaacccgcaaagcgtcgcgatggggattggcctgattttactgctgggattcacctgttacgccagtcgcgggctgtactgggcctgccctggcgaagcgagaacaccgtcttacattatgggcaccacggtaggtatttgtagcgtgattggattcctgccggatgtcttcgtttacccaattatcggccactggcaagacaccctgcccgctgcagaagcctaccgcaatatgtggctgatgggcatggcggcgcttggcatggtgattgtctttacctttttgctgttccaaaaaattcgtactgctgatagcgcccccgcaatggctagcagcaagtaagccaggaaaattacaggagaaaaatcatgagcaaaaaatacatcatagggattgatggcggaagtcagagcacaaaagtggtgatgtacgatctggaaggtaacgtggtttgcgaaggcaaaggcttattacagccgatgcacacgccagatgccgatactgcagaacatcctgacgacgatttatgggcaagtttatgttttgccggtcacgatttgatgagtcagtttgccgggaataaagaagatattgtcggtattggtctgggatccatccgttgctgccgtgcgttattgaaagccgatggcacgcctgctgcgccgttgattagctggcaggatgcacgcgttacacgcccttacgaacacactaaccctgacgtggcatatgtcacctcttttagcggttatctgacgcatcgcttaaccggcgagtttaaagacaatatcgccaactattttggtcagtggccggtggattataagagctgggcatggagcgaagatgctgcggtaatggataagtttaatatcccccgtcatatgctgtttgatgtgcaaatgcctggcaccgtcctcggacatatcacaccacaagccgcactggcgacacatttcccggcaggactgccggttgtttgtaccaccagtgataaaccggtagaagctctgggggccggattactggatgatgaaacggcggtaatttctcttggcacttacatcgcattgatgatgaacggcaaagcactgccgaaagatccagtagcgtactggccgattatgtcttctattccgcaaacattgctgtatgaaggttacggtattcgcaaaggcatgtggacggtgagctggctgcgcgacatgctaggcgagagcttaattcaggatgccagggcgcaggatcttagtccggaagatttactcaacaaaaaagcttcttgtgtgccgccaggctgtaatggtctgatgacggtgctggactggctgaccaatccgtgggaaccgtacaaacgcgggattatgatcggctttgattccagcatggattacgcatggatatatcgtagcatactggaaagcgtggcgctgacgctgaagaacaattacgacaatatgtgtaatgaaatgaatcactttgcgaagcatgtgatcattactggcggcggtagcaacagcgatctgtttatgcagatttttgccgacgtgttcaaccttccggcacgacgtaacgccattaacggttgtgcaagcctgggggcagcgattaatacagcggtaggtctggggctatacccggattacgcaacggctgtcgataacatggttcgcgtgaaagatatctttataccgattgagagcaatgccaaacgctacgacgcgatgaataaaggcattttcaaagacctaaccaaacatactgatgtgatcctgaaaaaaagctatgaagtgatgcatggggaattggggaatgtggatagcatccagagctggagcaatgcgtaagtgaggaaggccgggcgggaaactgcccggcctgaacatacctgaatggttatccccgctgacgcggggaacataagttcgacaacttaaaaaatgataacaagtccggtttatccccgctgatgcagggaacataataaaaactttaactagttcggtttatccctgtttttacaaggaatattaactacactcgatgtctttagaataaaagacaatacgaatcgcactttatcaattttcacttaaagtatgaactggatatctttattcataagaactattcatcaacagcgtatagaggcggttatgtaaaaccactcattagcctcaaaacaaagacaaacttccagatttattacttaaccaatgaataacaagcttaaaaaatatactgttattctaaagaaaaaattaacaggcattaattcaatattaaaaaaataatagattaaaatttcttaacgatttaagaatcatacaaataacactttgattaaatttaattttttgtatcgataattgtgaacctctctggcatggagaactattttgaacatgaggtgttacgtggatatgttgcttattacaagtactgctaatataaaaacttgagaaagagataacgggttatatggtggtttatccccgctggcgcggggaactcgacagaacggcctcagtagtctcgtcaggctccggtttatccccgctggcgcggggaacacctgttttcgcaaatctatggactattgctattcggtttatccccgctggcgcggggaacacgggcgcacggaatacaaagccgtgtatctgctcggtttatccccgctggcgcggggaacactggctctgcaacagcagcacccatgaccacgtcggtttatccccgctggcgcggggaacacgaaatgctggtgagcgttaatgccgcaaacacaggtttatccccgctggcgcggggaacacattacgcctttttgcgattgcccggtttttgccggtttatccccgctggcgcggggaacactctaaacataacctattattaattaatgattttttaagccagtcacaatctaccaactttatagtatcacacaaacaacacatccattatgttaaagagcacttaatccattgattaaaaaggtaaatatttaaaataactctatacaaactaaaatctaccaaactttaccgcaataattttcactccagcgaaaaattaatgccacagaatttgtagagaatgctaatgattagccctggatgggtaaaatggaggagttttcagaggcgacaaacaatataaatgagtagaagtctttacaggttccacccatttataacgcttataaatgtttaatcaggcaatatttagatatttatgtgtttgcatgctcaaacgccaattacgcgcaatgcaggtttcaatgcacaaacgtgtggcatcatccttttggctaatcggctgcagtgcaatgactcgcggtttatcatcggtcagcgttgccagtagttcatccagtgcttcaatatcgcgtacgcgccccactggatgcttgatttcgttggctcgctccagtgcctgactcaacacttcatagccgccgcgcatgttcagctttgggcttacggtaacccaggtattcggtgtgcagcgtacctcatgagtaccactggtttcgatctggcagctaaaaccgttcttttcgagcagatcagtcagtggcagcaaatcatgaatgcaaggctcaccacccgtaatcaccacatgccgcgcggtgtatccctggcgaccaatgacagccagcaaatcttcactgctcgcagccccccacttatcactctctttggtcttcgccagaatgctgaaaagggagacttcccgatcctcaagcttttcccaggtgtgtttggtgtcgcaccaggcacagccaaccgggcatccctgtaaacgaataaaaatggcgggaacgccggtaaagtaaccctcaccttgcagggtctggaacatctcgttaatcgggtactgcatagcattctctgtgaagtggataattgttaattattgcagatcctgccacaacaatcatgtcttattaacattctgttacaggcaggtttaaagaaaaatgcgaaacatatcgttaataattaaagggagtaacgtattatgtcagaagaaaataaagaaaatggatttaatcatgtcaaaacattcaccaaaattatatttattttttctgtattagtttttaatgataacgaatataaaattaccgatgccgccgtcaatttatttatccagatttaatgagaaatttataatgcgctatttcatactaatgttcactttcgtatgttcctttgttgcagcccaaccaactattgtcccacaattacagcaacaagttacggatcttacgagtagcttaaacagtcaagaaaagaaagaactgacgcacaagttagaatctattttcaataatacccaagtgcaaattgccgtattaattgttcccacaaccaaagacgagacaattgaacaatatgctacaagagtttttgacaattggcgtttaggagatgccaaacgtaatgatgggatactgatcgttgttgcctggagcgatcgcactgtccgcatccaggtaggttatgggctggaagaaaaggtaaccgatgctctggctggagatatcatccgtagcaacatgatacccgcatttaaacaacaaaaattagctaagggattagagctagctataaacgctttgaataaccaactcactagtcaacaccaatatccgactaatcctagtgaaagtgaaagtgcgtcttccagtgatcattattactttgctattttttgggtatttgcagtgatgttcttccctttctggttttttcatcaaggcagtaatttttgtcgcgcatgtaaaagtggagtctgtattagtgcaatctatcttttagatttattcctgttctccgataaaattttttccattgctgtattttccttcttttttactttcaccatatttatggtctttacctgtttatgtgtacttcagaaaagagcatctggtagaagttatcatagtgacaacagcggttccgctggaggcagtgatagcggcggatttagcggcgggggcggttcttctggaggtggcggcgcatccggccgctggtaactcaaccataaaaaatgccagcccggaggctggcatttttaaatcagataaagtcagtcttatgcctggcctttgatctctttacgaccgttgtacggtgctttttcgcccagagcttcttcgatacgaatcagctggttgtatttagcaacacggtcagaacggctcatagaaccagttttgatctggcctgcagcagtaccaacagccaggtcagcgatggtagcgtcttcagtttcgccagaacggtgagagataactgcagtgtagccagcatctttcgccatcttgattgcagccagagtttcggtcagagaaccgatctggttgaatttgatcaggatggagttagcgatacctttttcgataccttctttcaggatcttggtgttggttacgaacaggtcgtcaccaaccagctggattttgtcgcccagaactttggtctggtatgcgaaaccgtcccagtcagattcgtccagaccgtcttcgatagaaacgatcgggtactgtttggtcagttcttccaggaagtgagtgaattcttcagaggtgaacgctttgttgccttcgccagccagaacgtatttaccatctttgtagaattcagaagctgcgcagtccatcgccaaagtgatgtctttgcccagttcataaccagcagctttaacagcttcagcgataacagccagagcttcagcgttggaacccaggttcggcgcatagccaccttcgtcaccaacagcagtgttcatgcctttcgctttcagaacttttgccaggtgatggaaaacttcagaacccatgcggatggcttctttcacagttttcgcgccaaccggctgaatcatgaattcctggatatcaacgttgttgtcagcgtgctcaccaccgttgatgatgttcatcatcggaaccggcatagagtatttgcccggagtaccgttcagttcagcgatgtgctcgtacagcggcatacctttagcagctgcagcagctttggcgttagccagagatacagccaggattgcgttcgcgccgaatttggatttgttttcggtgccgtccaggtcgatcatgatcttgtcaatgccagcctgatctttagcatctttgccaatcagcgcctgagcgatcgggccgtttaccgcagcaacagctttggttacgcctttacccaggaaacgggatttgtcgccatcgcgcagttccagagcttcacgggaaccagtagaagcaccactcggagcagctgccataccgacgaaaccaccctccagatgtacttcggcttcaacagtcgggttaccacgggagtcgatgatttcacgaccgatgatttttacgattttggacattaggttttcctcaagtcactagttaaactgaaactccagacaaacaacgcgtacccagggtacgcgttgccgctctaacttttttacttacttcgcctgacgtttctggaactcgctggcggctttcacaaagcctgcaaacagcgggtgaccatcacgtggagtagaagtaaactccggatggaactggcaagccacgaaccacgggtgattcggaacttcgatgatctcgaccaactgatcatccccggaacggcccgcaacgcgcagacctgcatcttcaatctgtttcaacagcatgttgttgacttcgtaacggtgacgatgacgctcaacaattgtcggcgcattgtacagctggcgaaccaggctatcgtcaaccaactggcactgctgtgcgccgagacgcatggtaccgccgagatcgctcttctcgctacgaacttcaacgttgccgttttcatcgcgccactcggtaatcagcgccacaaccgggtacttacagtctggcacaaattccgtagagttggcgttctccatgttggcaacatggcgagcgtaatcaattaacgccacctgcatacccaggcaaatgcccagataaggaatattgttctcacgcgcaaaacgcgcggtcgtaatcatgccttctacgccacgatagccgaaaccgccaggtacgaggattgcgtccagacctttaaggatttcaacgccgcgcgtttcaacatcttgactatcgatcagtttgatgttgacgctgacacgattcttcagcccaccgtgtttcagtgcttcgatcacacttttataagcatccggcagttcaatgtacttgccgaccataccgatggtgacttcacttaccgggttcgcttcttcgaagataacctgttcccattcggacagattcgcttccgggcagtttaagctgaatcgtttacaaatataatcgtccagcccctgagatttcaacaggcccggaattttatagatggaatcgacgtctttcagagaaataaccgctttttccggaacattacagaacaatgcaatcttcgcacgttcgttcgccggaacagcgcgatcactacgacaaatcaggatgtcaggctggataccgatggagagcagctcttttacagagtgctgagtcggtttggttttgacttcaccagacgctgccatgtacggcaccagcgtcaggtgcataaacagagtgtgctcacggccaatttcaacagccatctggcgaatcgcttcgaggaacggcaaggattcgatatcacctactgtaccgccgatttctaccagtactacgtcatgaccttcgccaccttccagcacgcgctctttgattgcgttagtgatgtgcggaataacctgcacggttgcgccgaggtagtcaccgcggcgttctttacgcagaacgtcagagtagatacgacccgtggtgaagttgttgcggcggctcattttggtacgaatgaaacgctcgtagtgccccaggtccaggtcggtttcagcgccgtcttcagtaacgaacacttccccgtgttggattgggctcatagtacctggatcgacgttgatgtacggatccagtttcatgatggtcacattgaggccacgggcttcaagaatggctgcgagggaggctgcggcaatgcctttacccagagaggatacgaccccgccggtcacaaaaatatagttcgttgtcatgctgaacctgagaagttaggttgaaaagacgatggaataaccaagacgggaaagcagtatacccgaacatgacctgtgccacaaactttcattatccctcctcttcgccagcgcactattgaaatcaggagtgagaaaatagcccctttggggtaaatgtttttgacgcaaatcaagcgcttgtcatttaaaaaatgacacaaatggcgcttgaccgcgtaattcccttagagatcaatttcctgccgttttacctgttgccagacttcttccattgtttcgaggtcaacacctgtcatttccagtccacgcgcggcaacaatacgctccacttcgcgaaaacgacgctcgaatttttcgttcgctttttgcaatgcgatttctgctttcgtccctaaatggcgagccagattaaccgtggcaaacagcaggtcccccatttcctcctccagtttagcctggtcgacaacagcctgccgcgcttcgtacatcacctcgtcgatctcttcgtagactttatcgactaccggaccaagcgtcgtccaatcgaagccaacgttggcgcaacgtttctggattttttgcgcacgcattaaagccggtaaactacgaggaatatcgtccagcgcgctatgctgcgctttctgcgcgcgctcttcggttttgatttgctcccaacgggcaagcacttcactactgttttcggcagaactatcagcaaaaacatgcggatggcgacgctctaatttatcgctaatagcagcgcaaatatcattaaagtcaaagcgcccttcttcctgagccatttgcgcgtaaaacaccacctggaatagcagatcgcccagttcaccgcgaagatcgtcaaaatcttcacgggcgatggcgtccagcacttcgtaggtttcttcaagggtgtaaggcgcaatggtggcaaatgtctgctctttatcccacgggcagccgttttccggatcgcgcaggcgctgcataatagtgagcaaacggtcgatttgattcattgaattgtcctgaaaattgcgggtctgtcaggtggaaacctgtgaccagaatagaagtgagttagtaacattacccaatcagtacgttaattttggctttaatgagttgtaattcctctggggcaactgttcctttcttcgttgctcctcttgcccgccaggcgatactttttacctgatcagctaacgctacgccatcacgttcctgaccggataaaacaacttcgaacggatatcctttactttgcgttgtacaaggaacacacagacacatacctgttttgttgttgtacatgaaaggactcaggacaacagctggacgatgtccagcttgctcgctaccttttgtcgggtcaaaatcaacccaaatcagatcgcccatatcgggtacgtatcggcttaccattaccagacttccttatctttcggctctccccagtcgatattctcgtggaggttttccggcgtgatgtcgttgaccagttcagcaagcgtaaatacgggctctttacgcactggctcaataattaatttgccatccaccaggtcaatcttcacttcatcatcaatattcagattgagcgcctgcattaacgtagccgggatccgcaccgccggactatttccccaacgctttacgctactgtggatcataaccctttcctcaaaccgctatcatatgtagatacagtatatatcaatctacattgtagatacgagcaaatttcggcttaactcccgtgcaaccgacgcgcgtcgataacatccggcacctggttgagtttacccagcacgcgccccagcacttgcaggttgtaaatctcaatggtcatgtcgatggtcgccagttgctgtttggtgtcgctacggctggcaacgccaagcacgttcaccttctcgttggcgagaatggtcgtgatatcacgtaacaacccactacgatcattagctaccacgcggaccaccaggctatatccggcggagtagctctcaccccataccgcgtcaacaatgcgttctggcgcatgggagcgcagttccgccagttgttcgcaatcggcgcggtgtacactaataccgcgcccctgggtaatgaagccgacaatctcatctccaggaatcggctggcagcagcgcgcgatgtggtgcatcaggttgccaacaccttcgactaccacgcgaccgttatctttactgcggttttgcggcgtgtagcttttttgctgaagttgcttcagcgcggcggcgtcctgctcttcggcactcggcttattaaattggctttgcaggaagttcaccatctgattgagacggatatccccgccaccaatcgccgccagcaactcgtcgacatcattgaagttgtaacgcggcagcagatgtttttctgcttctttcaggctgatccccagatgttccagctcgtcgtcaaggatttgccgcccagccagaatgtttttgtcacggtcctgtttacggaaccaggcgtgaattttgctacgcccacggctggttgtgacgtaaccgaggtttgggtttaaccagtcacggctggggttcggctgtttctgggtgataatttcaatctggtcgcccatctgcagctggtaggtgaacggcacaatgcgcccgccaatttttgccccgatgcagcggtgtccgacatcactgtggatgtggtaagcgaagtccagcggcgtacttcccgcaggcaaatcaacgacatcacctttcggcgtaaagacgtacacccggtcgtcaaagacctgactacgtacttcgtcgagcatttcgccggaatcagccatctcttcctgccacgcaatcagtttacgcagccaggcaatccggtcttcatgtccgctacgtgcgccgccagcagccgcgccctctttatatttccagtgcgcagcaacacccaactctgcatcttcatgcatctgtttggtgcggatttggatctcaacggtttttccacccggccccagaaccacggtatgaatagactgataaccgtttggtttcgggttagcgacgtaatcgtcaaactcatccggcaggtggcgatagtgagtgtgcactatccccagtgcggcatagcaatcctgtaaacgctcggcgacaatacgtaccgcacgcacatcaaacagctcatcaaaggcgaggttctttttctgcattttacgccagatgctgtagatgtgtttcggacgaccatacacttccgctttaacgccttcagctttcatctcagcgcgcagatgaccaacgaactcttcgatgtagtgttcgcggtcgagacgccgttcatgcagcagtttggcaattcgtttgtattcggttggatggaggtaacggaagcagtaatcttccagttcccatttcagttgtccgattccgagacggttagccagcggtgcgtagatgttggtacactcttttgccgccagtacacgttcatcttccggcgcatcttttacttcgcgcagatgagcaatacgctccgccagtttgatgactacgcagcgaaaatcatcgaccatcgccaataacatccggcgaacgttatcgacctgttcggaggaaacagaatcagtgtgcgtcgctttcagctggcggatcgccgccatatcacgcacgccgtgaataaggttaacgacgctcttaccgacgctctcacgcagcacatcttcgctgactacgttggcatccgccagagggaaaagcagcgccgcccgcagcgtgtcaatgtccatacttaatgtgctgaggatctccaccatctcaacaccacgccacaataacagactggcatccggatgcccctgcgtctgttgcagacaatacgcccaggtttcggctaagcactcacagctcttctggctggtaatacccagacttgcgatccatttttccggatcaaattcaccagccttattgatatgtgcacttcttaccgcaaccatcgtcctctcctttagggaccagacctgccgaaatcggcaaatcgcaattatttaacgcggctgaaaagtaccatgctttccagatgtcccgtgtgtgggaacatatccagcatcgccagtcgcgcaatggtatatcctgcttttaataacgcttcgctatcccgagccagcgttgcagggttacaggatacataaactatacgaataggttccagttttataatttgctgcataacacctgcggcacctgctcgcgccgggtccagcaacactttatcgaagccgtttttcgcccacggctgctttgtgacatcttcttcaagattttcgtgataaaacgtcacattctgtaagccattaagacgcgcattctgctggcctttttccaccagcgccggaacaccttctacaccgaccacactggcagcttgtgtcgccaatggcagtgtaaagttgcccataccgcagaacagatccagtacgcgatcttcaggttgcacatccagccattccaacgcacgcgctaccattttttggttcacacccgcattgacctgaataaaatcgcgcgggctaaaagttaagcgcaacccgttactgtcataccagggcatctcaccagagacggtttcgagtatctcactatcgggggcgagatacagatccaggccttcagaatggctaaagcgttccagtttttcgcgatctgcgctacttagcggtgcggtatggcgcaaaatcatcagcgtgccgctggttgcctgtaccagttcaacatgaccaagatggcgcatagcttgtaagctgcccagacatgccctgactttgggcagcaatgcttcaagttggggcgctaaaatggggcattgtttgacgtcgacaatgtcactggagcccgctttgcgaaaccccatctgaagttgctgtgttttcggtaagtagttcagacttaaacgcgcgcgacggcgatagccccagggaacatcggcgatcacttcagagacatcgtgtttcattaatcgggcgagtgccgcacttttgcttcgctgctgtaaatccacgctggcgtgttgttgctgacagccaccgcatacgccaaaatgaggacagcgtggcgtttcgcgttccgggctatcgcttaaccggcgtacgactttagcgcgggcatactgttttttatcttcagtaacagtaacttccgcgttttcctgcggcaataatccggggataaatagcgttttgccgttatgtcgcgccacgccctgaccaaaagagtcgaggtcgttgacactaacggttatgatctgacgcgtcgtcgtgcgtcgttttgcagagtagaattgcgccattggcgagactttctcaatttaacagtgtgaccttaattgtcccataacggaactccatgaccaactacagcctgcgcgcacgcatgatgattctgatcctggcaccgaccgtccttattggtttattgctgagtatctttttcgtcgtgcatcgctataacgacttgcagcgtcaactggaagatgccggtgccagcattattgagccgcttgcagtttctactgaatatggcatgagcctgcaaaatcgcgaatctatcggtcagttaataagcgtactgcatcgtcgccattccgatattgttcgcgcgattagcgtttatgatgaaaataaccgactctttgtcacctccaattttcatcttgatcccagtagtatgcagctcggcagcaacgtgccgtttcctcgccagctcactgtcactcgtgacggcgatattatgatcctccgcacgccgattatttctgagagttactcccccgacgaaagccccagtagcgatgccaaaaatagtcaaaatatgttgggatatattgcgctggagctggatcttaaaagcgttcgcttgcagcaatataaagagatctttatttccagcgtgatgatgctgttttgtatcggtattgcgcttatttttggctggcgcttaatgcgcgatgtaaccggtccgattcgcaacatggtgaataccgtcgaccgcatccgtcgcgggcaactcgacagccgggtggaaggatttatgctcggcgagctggatatgctgaaaaacggtatcaacagcatggcaatgagcctggctgcttatcacgaagagatgcagcacaatatcgaccaggcgacgtccgatctgcgtgaaacgctggagcagatggaaattcagaacgttgagttagatctggcgaaaaagcgcgcccaggaagcggcgcgtattaaatccgagtttctggcaaatatgagtcacgagctgcgtacaccactgaatggtgttattggctttacccgcctgacgctgaaaacagaattaacaccaacgcagcgcgatcacctgaatacgattgaacgtagcgcaaataatttgctggcaattattaatgatgttctcgacttcagcaaactggaagcaggtaagctgattctggaaagtattccattcccactacgcagcacgctggatgaagtcgttactctgctggcacattcttctcacgataaagggttagaactgacgctcaatattaaaagcgacgtgcctgataacgtgatcggcgacccgctgcgattacagcaaatcatcactaacctggtggggaatgcaattaaattcaccgagaatggcaacattgatattctggtagaaaaacgtgcgctgagtaataccaaagtgcagattgaagtgcagattcgggataccggcattggtattcctgaacgcgatcaaagccgcttattccaggccttccgacaggctgatgccagtatttcccgccgtcatggtggcaccgggctggggctggtgattacacaaaaactggttaatgaaatgggcggcgatattagcttccatagccagccgaatcgcggtagtactttctggttccacattaatctcgatctgaacccgaacattattatcgaagggccatccacccagtgcctcgcaggtaagcgcctggcctatgtcgaaccaaactccgcagcagcgcaatgcacgctggatattttaagtgaaacgccgctggaagtggtttatagcccaacgttctccgcgctgcctcccgcgcattacgacatgatgttgttaggcatcgcggtgaccttccgcgagccgctaacaatgcaacatgagcgattagcgaaagcggtaagcatgaccgatttcctgatgctggcacttccttgccatgcacaagtcaatgctgaaaaactcaagcaagatggtatcggcgcgtgtctgctgaaaccattaacacctacacgcctgttgcctgccctgacggaattttgtcatcacaaacaaaacacgcttttgcctgtaaccgatgaaagtaagctggcaatgacagtcatggcggttgatgacaaccccgctaacctgaaacttatcggcgcattgctggaagatatggtgcaacatgtggaactttgcgatagcgggcatcaggcggttgaacgggcgaaacagatgccgttcgatttgatcttaatggatattcaaatgccggacatggatggcattcgggcctgcgaactcatccaccaactcccgcatcagcaacaaacgccggttatcgcggtaacggcgcatgcaatggccgggcaaaaagagaagctgcttggcgcagggatgagcgattatctggcgaaaccgattgaagaagagcgattgcataatttgttgttgcgctacaagcctggcagcggtatttcctctcgcgtcgtgacgcccgaagtcaacgaaattgtggtgaacccgaatgcgaccctcgactggcaactggcactacgccaggcagcaggaaaaaccgatttagcgcgcgatatgctgcaaatgttactcgatttcctgcctgaagttcgcaacaaagttgaggaacagctggttggagaaaacccggaaggcctggttgatttgattcataaactgcatggcagttgcggctatagcggtgtgccacgtatgaagaatctctgccaactgatcgaacaacagctacgtagcggtactaaagaagaagatttggaaccggagctgctggaactgttggacgagatggataatgtcgcgcgcgaagccagcaaaattctcgggtaatggatgtcttgtcgagtagcaatcggctttttatgacgctggtttcagattggtgacaaagtgcctgtgtttatgccggatgcggcgttaacgccttatccggcctacaaaaccaattaaattcaatgaattaaaaaatgatgtagacctgatacatagcacaacaggctattttgcgtttagcatcagtctcaaaccggctccagatagagccggttttggttttctgtcttaacgcaccatgcacgggcgcttgttatcgaacgtccagccaggaatcagatactgcattcccatcgcatcgtcacgcgcgccaagcccgtgtttctgatacagctcatgggctttcatcacttgatccatatcgatttctacacccagccccggtttttctggcacctgtaccagcccgcctttgatctcaaacggttctttggtcaggcgctgattgccttcctgccaaatccagtgcgtatcaatagcagtaattttacccggtgcagcggcggcaacatgggtaaacatcgccagggaaatatcgaagtggttgttagagtgactaccccaggtcaggccaaattcatggcacatttgcgccacacgtacgctaccttgcattgtccagaaatgcggatccgccagcgggatatcaacggattgcagggagagcgtatggcccatttgccgccagtcggtggcgatcatattggttgcagtcggtagacctgtcgcgcgacggaactctgccatcacttcacgcccggagaaaccttgctccgcaccacacggatcttctgcataagccaggctacctttcaggtatttaccgattttaatcgcttcgttcaggctccaggcaccgttaggatcgagcgtaatacgcgcctgcgggaagcgttgcgccagtgccacaatagactcggcctcttcttccccggccagtacaccgcccttcagtttgaaatcgttgaagccatatttttcatatgccgcttccgccaggcgcaccaccgcatccggcgtcatcgcttcttcatgacgcaggcgataccagtcgcaactgtcatccggctggctttgatacggcagcggcgtggctttgcgattaccgacgaagaacagataaccgagcatttcgacttcgctacgctgttgaccatcgcccagcaggcttgccacgtttacccccagatgctgccccagcagatccagcattgccgcttctatcccggtaactacatgaatagtggtacgtaggtcaaatgtctgcaaaccgcgcccaccagcatcacgatcggcaaaagtattacgcaccagcgtcagaacgtttttgtattcacccagcgttttacctaccaccagcggaatcgcatcttccagcgttttacggattttctcgccgccgggaatttcccctacgccagtgtgaccagaattatctttgataatcacaatattacgcgtaaagaacggtgcgtgtgcaccactcagattcatcagcatactgtcatgacccgccaccgggataacctgcatttcagtaacaacaggcgtcgtaaattgagaactcatatttatgtcctttttcagaatcaatgacggccgaaaacgggacgtttacggtcaaaggtccagccggggatcaggtactgcatcggacctgcgtcgttacgcgcaccgccaggcagacgtttataggcctcatgtgccttttgtacctgttcccagtccagttccacgcccagaccgggcgcatcaggaacggcaatttttccgtttttaatctccagcggattttgggtcaggcgacaatcgccctcctgccaaatccagtgggtatcgatagcggtaggattacccggtgccgccgcgcccacatgggtaaacatcgccagagagatatcgaaatggttattagaatggcagccccaggtcagcccccagtcgtcgcaaagctgcgccacacggactgcaccggaaagcgtccagaagtgcggatcggcaagtggaatatctaccgcattgagcatcaccgcatgacccatttcgcgccagttggtggcgatcatgttagtcgcgacgggcaagccggtcgcccgtcgaaattccgccatcacttcacgtccggagaagccctgttctgcgccgcatggatcttcggcataggtaagaacatcattcagccctttgcataaagaaatggcttcatcaagcagccatgcaccgttgggatcaacggtaatccgcgcatccgggaagcgtttcttcaatgcacgaacagtgtcgatttcttgctcgccaggtaacacgccgcccttaagtttgaaatctttaaagccgtagcgatcctgactggcttccgccagacgcacaacggcttcgctgttcattgctttctgatgccgcaactgataccactcatggttgcccggcgtattttccacataaggaagatcggttttggtccgatcaccgatataaaacagataaccgaggacggtaatagcctcgcgttgcttgcctggccctaacagttcgcagaccggaacattcagcgccttacctagcaggtcaagcaaagcggcttccagcgccgccacggcgttaacgcgtaattcaaaggtccaggcacctttaccgaaggtatcaaaatcggcggcctgattacctttatgcacctgctggaccactttattcagtcgcgcaacttcctggcccagaaccatcggaatagcatcgacaagcgtctgataaatcacatctccgcccggcgcttcaccaatgccggtatgcccggcgttatcggtgagtaccacaatattgcgggtgaaatatgcgttatgtgccccaccaatattaagcaacatgctgtcatgcccggccaccggaatgactttcatatcagtaataacaggactggattgtgtcgccatcttattgccccgcaacaggtttcaactcgatacgcttgatatcgcccaccagcaccaggtagctcagtaccgcgattaaggcatgaacaccaacataaatcagcgccccattaaagctgccagtcgtgccaacgatataaccaattgcgattggcgtgacgatgccagaaatgttaccgaacatgttgaacaggccaccggaaagaccgctgatctcttttggcgcggtatctgccattactgcccaacccagcgccccgatgcccttaccgaagaaggccagcgccataaagccgatgatcatccactcaacgttgacgtagttgcagaacaccatcaccatgctcagcaacatgcccattacgatcggtgttttacgcgcaatgttcaggcttcccgtgcggcgcatcagccagtcggaaataatcccacccagcacaccgccgataaaaccgcaaaccgccggaacggaagccacaaagcccgctttcagaatgctcatcccgcgtgcctgcaccagataaaccgggaaccaggtaataaagaagtaagtcagggcgttgatacagtactgaccgatataaacgccgatcatcatccgactccctagcagctgtttgatctgcccccacttcacgctgaacggcactttaactttggtgttttgctgatccatattgatcagcgcaccacccgcggcgatgtactccagctctttcttatttacccccggatgttgatttggctcgtggatgactttcaaccagataaagctgatgacaatccccagaccgcccataaagaagaagacgtgactccagcccacttcatgcgtcagccagcccataatcggcgcgaagatcaccgttgcgaagtattgagcggagttaaaaatgctcaccgccgttcccctttcctgcgccggaaaccaggccgcaacaatgcgactgttgccggggaaagatggcgcttcagcaagcccgaccaggaagcgcagcgtaaacagggcaacgataatgccgaatccactaaagatatcgacgaagccttgcagcaaggtaaacatgctccagataaagatgctccagaagtagacgcgtttactaccaaaacggtccagcaaccagccaccagggatctgcccgataacataagcccaactgaaagcagagaacacatagcccattcccacgggatcaaggccgatatctttggccatttcgctaccggcgatagagagcgtagcgcggtcgccgtagttgaaggatgtgacgataaacaacatcaccactatccagtaacgagcatttgtgcgtttttccacactgctcgcagcctgacttaaagaactcattgttgcactcctgaaaattcgcgttagccacgctcactctggactgcgacatcgccaggaaatcagaggtgacgtagggtgttttttgccgtttttataggtcgttcgccgaatacggcgcgtgtttatatctggcaatagcagtataaaaagcgcgccatagcggctcaccgtgcaacaacacaacattaatgcgttcaatgaggcccgattttggcattagccctggacggtggaatccacttcacggaaatgaaaacaagaacaagaaaggaagggttaaaacgaagaaataaagaagagtatgaaatggatcgcttgactccaggcaaacgccagtaaaaatccgcgctatgaagcagtttttactggcatttgcctgaaaagattcgattcagcaccgctaaaacgacatttaccgctcgctgaacatatcaggacaacagcgtgccccactgttcgacccacggattactttccgtttccggttccgggttctcactggcgtcaatcaacagcatttcgccaacccgctgagcgctctgttcctgcaacaaggcatcgaactgtttgccgccattgcagaaattcacataactactgtcgccgagcgcaatcacgccataacgcagattcggctggaagcccagactatctttgattccctgaaagagtggcacaatgctatcaggaaggtcgccctgcccggtcgtggacgtaaccaccagaacatacttatcctgatagggcagccagtcgcttaattcaggatcttcaaataccgttgctttgtggccctgcgcggtcagaatcgcttccgcttcttcggccactaacagactattcccgtacatggtgccgacaaaaataccaatttccgccataccgttttctccctggattaggaacttatctctccatcctgaccgcttggcgcactgaactcaaccctttcattttcaggaagcagaccgcgccagccaaattgacttaacgcctgcatccaggtgtcgtccaggcccgcgtgaatagtcagcggctcgccagtaaaaggatgcgtcaaactcaactgactggcatgtagcattaaccgctggaggccaaaatgctcagcaccgctgcgattctggcgtaaatcgccatgtttgctatcgccaataatcggatgacgcaaatgggcaagatgtcggcgaagctgatgtttgcgtccggttttcggctccagttccaccaggccgtagcgcgtggtcgggtaacgtccggtcgctaccggcatttctacggtcgccagaccgcgataatgcgtcactgctggctgcgggcctttatcttcgcgggcaaatttatcagcgattttgtccagttcttccaccagtggataatccagcaccgcttcttccatcaaccagccgcgcacaatcgcatggtaacgtttctggatttggtgctgttcaaactgttgtgccagcagccgtccggcctcgctggataatcccatcaacaacacaccagaagtgggtcggtccagacgatgagcagtaaaaacatgctggcctatctggtcacgcacggtttgcatgaccactactttctcgtcgcgatccagccagctgcggtgaaccagccagccggagggtttatttaccgcaaccagccattcatcctgatagagtatttccagcattagctcgcatcatccgcaaaaagagcatccagtttttccagctcagccagaataagcgcgcgttgcggatggtccgtcgccagcgccatttcataatagggtgcaacggcaaaagcgcccggtaacggctgtttgttatctaacaaatcgtgcattcgcgggatcagcacccactgcaaccactccagtggttccatggtgtccataaagaacggttgggtactattaaattgatgcggctggggttcatcgtttcgccagtgctgatgttcacgcagtaacgcttcaagcgcctgcaactggagacgaacgcggtcatgagtggtcataaagcaacctcaataagaaaaactgccgcgaaggatagcaggaataaaaaaagggagcactgtattcacagcgctcccggttcgtttcgcagcattccagctacttttgttgctccctgctcatccttgacaacttttcctctggccttgcggccaatcgttcatcctgaactattgcttcctgctcacaccaccccgatgtgatacttcatcctgaagtgtccctggccttcctgacccaccgaatcatcctgaccggttctcattctccatcctggaggtgtcctttaacgcgtcctgcgtcatcctcttcgcttcatccagaagcctttccctgaaacaccatcctggtgtgtcctgcagaagtgtcatcatcctgatgttcacttcgttgtctgactccctgtcgacgaagatagaatcgtctttttcgcgaagtcttacaaggcgcttacagacaatgccttaaggaaaatttcatatgaaagttaagaattaacaatcaacattttgattttaaatgaaaataacgattcttatctttttaagtattcgcttatttcctggcgatctcctacagagtctgtaagagatctctcacaaccagatggggtatttggattacagaagaggcttaagttgattaaggaattccgcaagattactggctaaatgcgtccgtttacgtgttcccagcgtctctttgcacacttcaccggagagattacacacgctgatgacctctaactcttcttccagcgtcgcgataaatagtgtgggcggcagttttagccttttctgagtcaccagatgaccaatcagattttcctgcacccgacggaagtcgtcttcactccaggtttgcagcaatgtcagtttgatatcgccaaactgcgcgtgcatatccccggcaaactgagtcgtataaaaggtatgaattgtgggttgtatcacaatatcaaaagcgcgttcaaccgcgtttacattttgttccccggtaaacggctggggttgccagtatacggcatcttcggtagtactaataatgcacggactaggaacaccgtacagttcctcacttaacggccagcttttatgctcttcatgccacgcatcgcagtagcgtgcagtaaaatctttcagggcttgtgcggtcaaatcgtccactaatttctctcttcacttaaaccagatacacttgtcgtttagtttatctggtttatgacggtgaaacatgtcttcttatgcaaaccatcaggcacttgcgggcctgactcttggaaaaagtaccgattaccgggatacctatgacgccagcctactgcaaggcgttccacgcagcctgaatcgcgacccgctgggtctgaaagcggataacctgccttttcacggtacggatatctggacgctgtatgaactttcctggctgaatgcgaaaggtttgccgcaggtcgctgtcggtcatgttgaacttgattacaccagcgtaaatctgattgagagcaagagttttaagctctatctcaacagttttaaccagacgcgttttaataactgggatgaggtgcgccagacgctggagcgcgacttaagcacttgcgctcagggtaagattagcgtggcgttatatcgtcttgatgaactggaaggccagccgataggtcattttaatggcacttgcattgatgaccaggatatcactatcgataactatgaattcactactgactatctggagaatgccacctgtggtgaaaaagtagtggaagagacgcttgtcagccacctgctgaaaagtaactgcctgatcacccatcaaccagattggggtagcctccaaattcagtatcgtggacgccaaattgacagagaaaaactgctgcgttacctggtcagtttccgtcatcacaacgagttccacgaacagtgcgtggaacgcatctttaatgacctgttacgcttctgccagccagaaaaattgagcgtttacgcacgttatacccgtcgtggcggtctggacattaacccgtggcgcagtaatagcgattttgtcccaagcaccacaagactggttcggcaataaatttttctcaattttgcgtgctggattcacgcagaaggttgtgaaaggtcatcaggcagggctattgtaatcaaagggaatgacgatattcgtcccataaggagtttttcttgattacacatattagcccgcttggctccatggatatgttgagccagctggaagtggatatgcttaaacgcaccgccagcagcgacctctatcaactgtttcgcaactgtagtcttgccgtactgaactccggtagtttgaccgataacagcaaagaattgctgtctcgttttgaaaatttcgatattaacgtcttgcgccgtgaacgcggcgtaaagctggaactgattaatcccccggaagaggcttttgtcgatgggcgaattattcgcgctttgcaggccaacttgttcgcggtcctgcgtgacattctcttcgtttacgggcaaatccataacaccgttcgttttcccaacctgaatctcgacaactccgtccacatcactaacctggtcttttccatcttgcgtaacgctcgcgcgctgcatgtgggtgaagcgccaaatatggtggtctgctggggcggtcacagtattaacgaaaacgagtatttgtatgcccgtcgcgtcggaaaccagctgggcctgcgtgagctgaatatctgcaccggctgtggtccgggagcgatggaagcgccgatgaaaggtgctgcggtcggacacgcgcagcagcgttacaaagacagtcgttttattggtatgacagagccgagcattatcgccgctgaaccgcctaacccgctggtcaacgaattgatcatcatgccagatatcgaaaaacgtctggaagcgtttgtccgtatcgctcacggtatcattatcttccctggcggtgtgggtacggcagaagagttgctctatttgctgggaattttaatgaacccggccaacaaagatcaggttttaccattgatcctcaccggcccgaaagagagcgccgactacttccgcgtactggacgagtttgtcgtgcatacgctgggtgaaaacgcgcgccgccattaccgcatcatcattgatgacgccgctgaagtcgctcgtcagatgaaaaaaagcatgccgctggtgaaagaaaatcgccgtgatacaggcgatgcctacagctttaactggagtatgcgcattgcgccagatttgcaaatgccgtttgagccgtctcacgagaatatggctaatctgaagctttacccggatcaacctgttgaagtgctggctgccgacctgcgccgtgcgttctccggtattgtggcgggtaacgtaaaagaagtcggtattcgcgccattgaagagtttggtccttacaaaatcaacggcgataaagagattatgcgtcgtatggacgacctgctacagggttttgttgcccagcatcgtatgaagttgccaggcagtgcctacatcccttgctacgaaatctgcacgtaatctccgctcccccggtgacgtttgttgccgggttttctcgtttttggtcacttactcatcaactcatttcatttgttatatgaatgtttcttaccaccctcacgcgacaaatatcatcacagttaatatgtcatacaatttatgttgcaacgcaaacgtttccctattttcataaaccgtattttatcgctatgaaaaagaaattatcgccatgattaactaaaagtattgattttttcagttcaacctacatatattgcgcgccccggaagaagtcagatgtcgtttaatgggcaaatattgcccttaaattctcttttacttttgatttacagagtaaagcgttgggataatctatcttccaagtagattattgtatttgagatcaagatcactgatagatacataacttgtgtgtatctttccgccctcaaattattacggcggtaaatgattaagccatcgccgatagacagatttcatttttacggtcaggcaccttcccgggctgaactggctaaaagctgaattatttgcattcctccaggagaaatagatggaaacgactcaaaccagcacgattgcgagcaaagactctcgtagtgcctggcgcaagacagacaccatgtggatgctgggcctttacggcacggcaatcggcgcgggcgtgctgttcctgccaatcaacgccggtgttggcggtatgatcccgctgatcatcatggctatccttgcgttcccgatgacgttttttgctcaccgcggcctgactcgcttcgtactgtctggtaaaaacccgggcgaagacatcaccgaggttgtagaagaacactttggtattggcgcaggtaaactgattaccctgctctacttcttcgctatctacccgatcctgctggtttatagcgtggcaatcaccaataccgttgaaagcttcatgtctcaccagctgggtatgacgccaccgccgcgtgcgattctgagcctgatcctgatcgtgggtatgatgaccatcgttcgcttcggtgagcagatgatcgttaaagcgatgagtattctggtattcccgtttgttggcgtactgatgctgctggctctgtacctgatcccgcagtggaacggcgctgcactggaaacgctgtctctggacactgcatctgcaaccggaaacggtctgtggatgaccctgtggctggcaattccggtaatggtgttcagcttcaaccactctccgatcatctcttctttcgccgttgcgaagcgtgaagagtacggcgatatggcagaacagaaatgcagcaagatcctggcattcgcacacatcatgatggtgctgaccgtaatgttcttcgtcttcagctgtgtactgagcctgactccggcagacctggctgcggctaaagagcagaacatcagcattctgtcttacctggctaaccactttaacgcaccggttatcgcgtggatggctccgattatcgcgattatcgctatcaccaaatccttcctcggtcactacctgggcgcacgtgaaggcttcaacggtatggtgattaaatctctgcgtggtaaaggtaagtctatcgaaatcaacaagctgaaccgtatcactgcgctgttcatgctggtaacgacctggattgttgccaccctgaacccgagcatcctgggtatgattgaaaccctgggcggtccaatcatcgcgatgatcctgttcctgatgccgatgtacgcaattcagaaagtaccggcaatgcgtaagtacagcggtcacatcagcaacgtattcgttgtcgtgatgggtctgattgcaatctccgcaatcttctactctctgttcagctaagtcctttcgcgccgctttcgggcggcgcttcctccgttttaacgcgatgtatttcctatgattagcgtattcgatattttcaaaatcggcattggcccttccagttctcataccgttggaccaatgaaagcgggtaaacaatttaccgacgatctgattgcccgtaacctgcttaaagacgtgacccgcgtggtggttgacgtgtacggcagcctctctctgaccggtaaaggccaccacactgatatcgccattattatgggcctggcgggtaacctgccggataccgtggatatcgattccatccccagttttattcaggatgtgaatactcatggtcgcctgatgctggcaaacggtcagcatgaagtggagttcccggttgatcagtgcatgaacttccacgccgacaacctttctctgcatgaaaacggtatgcgcattaccgcgctggcgggcgataaagtcgtttacagccagacttactactctattggcggtggctttatcgttgatgaagagcattttggccagcaggatagcgcaccggttgaagttccttatccgtacagtagtgcagccgatctgcaaaaacattgtcaggaaaccgggctgagtctctctggcctgatgatgaaaaacgagctggcgctgcacagcaaagaagagctggaacagcacctggcgaacgtctgggaagtcatgcgcggcggtattgagcgcggtatttccaccgaaggcgtgttgcctggcaaactgcgcgttccacgccgtgctgcggcactacgccggatgctggtcagccaggataaaaccaccactgacccgatggcggttgttgactggatcaacatgtttgcactggcagtgaacgaagagaacgctgctggcggtcgcgtggtgactgcgccgactaacggtgcgtgcgggattatcccggcagttctggcgtactacgacaagtttatccgcgaagtgaacgctaacagtctggctcgttacctgctggtagccagcgccattggttctctttataagatgaacgcgagcatttctggtgctgaagtgggttgccagggtgaagttggcgtggcgtgcagtatggcggcggctggtctggcagaactattaggcgcaagcccggcgcaggtgtgcatcgcggcggaaatcgccatggagcacaacctcggtctgacgtgtgacccggtcgccggacaggtacaggtgccatgcatcgagcgtaacgccattgcggcagtaaaagcggtgaacgccgcacgtatggcgctgcgccgtaccagcgagccgcgcgtctgcctcgataaagttatcgaaaccatgtacgaaacaggtaaagatatgaacgccaagtaccgcgaaacctctcgcggcggcctggcaatgaagatcgttgcctgcgattaatcgctctccaaaggcctcgttttgcgaggcctcttcccgatttctcatccagccgtagcctgttccggcatcgaatgttacccttatcgcctgatctttaagggggttatcgtggctgttcatttgcttattgtcgatgcactgaatcttattcgtcgcattcatgccgttcaggggagcccctgtgtcgaaacctgccagcatgcgctcgatcagctcattatgcacagccagccaacccacgcggtcgccgtttttgatgatgaaaaccgcagtagcggctggcgtcatcagcgtttaccagattacaaagcgggtcgaccgccaatgccggaagagttgcacgacgagatgcctgcattacgcgccgcctttgagcaacgcggcgtcccgtgctggagtaccagcggcaacgaagccgatgacttagccgccacgctggcggtcaaagtgacacaggccgggcatcaggcaacgattgttagcacagataaaggctactgtcagttacttagtccgacattacgtattcgtgattacttccagaaacgttggctggatgcgccatttatcgataaagaatttggcgttcaaccgcagcagttgcccgattactggggacttgcggggatcagcagtagtaaggtaccgggtgttgcgggaatcggaccaaaaagcgccacgcagctgctggtcgagtttcagagtctggaagggatatatgagaatctggatgcggttgccgaaaagtggcgcaaaaaattagaaacccataaagagatggcgtttctgtgccgcgatattgcccgcttacaaaccgatttgcatatcgacggcaatttacagcaattgcggttggtacggtaacggcgagccggatacgccgcaaacgtcgtatccggcattatcacatcagcgcatttaccaggcggtatggtaaagctctacaatatcctcaagcgttgcttcacgcgggttgccaccggtacaaacatcatccagtgccgcctgcgccagtgccggaatgtcttccttgcgtacaccaacatcacgcaaatgtggcggaataccgacatcacggttgagagcaaacaccgcttcaacagcggcattacgcgcctcttccaggctcataccttccactttcacgcccataacgcgcgcgatatcgcggtacttctcaccggtaaagtcagcgttataacgcatgacatgcggtaacaggatggcgttcgcaacaccgtgtggagtgttataaaacgcgcccagtggatgcgccataccatgcaccaaccctaacccaacattgctgaagcccatacccgcaacatactgcccgagcgccatttcttctccggcatccttatcaccagcaacgcttcctcgcagcgccccagcaatgatttcaatcgctttaatgtgcagtgcatcggttagcgcccacgcgccacgggtaatatacccctcaatagcatgagtgagcgcatcgacacccgtcgcagctttcagcgctggaggcataccatccatcatgtcagcgtcaataaacgccacctgcgggatatcatgcggatcaacgcaaacaaacttgcgccgtttctcttcgtcagtgatcacgtagttaatggtcacttctgccgcagtacctgctgtggtaggaattgccagaatcggtacactgggtttattggtcggggaaagcccttccaggctacgcacatcggcaaactccgggttgttgctgataatgccaatcgctttacaagtatcctgtggagaaccaccaccaatagcgatcaggtaatccgcgccgctattctggaatacaccgagcccttctttgacgacagtaattgttgggttgggcactacgccgtcgtaaatcgcccatgccagccctgcagcatccatcttatcggtcactttcgccaccacgccgcattgcaccagcgttttatcggtgacgatcagcgccttctgataaccacggcgtttcacctcatcggttaaagccccaacagcaccccgaccaaaccatgccgtttcgttcagaatcattctgttagccatcatccttctccttgttgctttacgaaattactcttcaattcgtaacccataggttttgaatttctccagcactacggcaatctcttcatcgctcagcactggcaccgggtccgtaatcgccagggtcgtcaggtaaagttgcgccagcacttcaacttcatgcgccagccataacgctttttccagattcacctcacaagcgataagcccatgatgttgtaacaaagttgccttacgatttttgagagccagcgcaacatgttcagaaagttcgcgtgttccaaaggtcgcataaggcgcgcaaggaatagaattaccgccagccgccgcaatcatgtagtgaatagcggggatgcttcggttaagaatggaaactgccgtgcaatgaacggcatgattgtgaacaaccgcgttggcatccggtctgctttgataggctgccatatggaaacgccattcgctactggggagctttccttcctcatgtttaccgttgccatcaataaagacaatatggctctccgtcagtttttcatatggaatgcctgtaggcgtaatcagcatcccatcctgataacgtacactgacgttccccgctgtcccctggttcagtcccaggcgggtcatttccaggcaagtgtcaataatctgacgagcaagtttatttcgttccattagctacctctctctgattcaaaacagggcaataatgttgttcctttcacactattgaattagccgtttaattacccaccatcttcttcctgattaacaagaaagaaattcacaagcttatattttgtgacctggttcaactaatcacagtaaataactgcaagttctctttttataaccccattaaaaatgaccgctcttaaaaatatttatcaaaacggtcatttttctattcctccaagcccggaatgaccgttttcggcacaaacaattaatacggtcatctgatttgtgttttttatgatttattttctgaaacgggcatgaaatttcgattattaaagtgatggtagtcacataaagtcaccttctagctaataagtgtgaccgccgtcatattacagagcgttttttatttgaaaatgaatccatgagttcatttcagacaggcaaatattcactgatatgaagcccgaactcgctggttttgcacttttgaaaacataaccgattacgtgcttaagcttctgaacctaagaggatgctatgggaaacacaagtatacaaacgcagagttaccgtgcggtagataaagatgcagggcaaagcagaagttacattattccattcgcgctgctgtgcagtctgttttttctttgggcggtagccaataaccttaacgacattttattacctcaattccagcaggcttttacgctgacaaatttccaggctggcctgatccaaagcgccttttactttggttatttcattatcccaatccctgctgggatattgatgaaaaaactcagttataaagcagggattattaccgggttatttttatatgccttgggtgctgcattattctggcccgccgcagaaataatgaactacaccttgtttttagttggcctatttattattgcagccggattaggttgtctggaaactgccgcaaacccttttgttacggtattagggccggaaagtagtggtcacttccgcttaaatcttgcgcaaacatttaacagctttggcgcaattatcgcggttgtctttgggcaaagtcttattttgtctaacgtgccacatcaaagccaagacattctcgataaaatgtctccagagcaattgagtgcgtataaacacagcctggtattaagcgtacagacaccttatatgatcatcgtggctatcgtgttactggtcgccctgctgatcatgctgacgaaattcccggcattgcagagtgataatcacagtgacgccaaacaaggaagcttctccgcaagcctttctcgcctggcgcgtattcgccactggcgctgggcggtattagcgcaattctgctatgtcggcgcacaaacggcctgctggagctatttgattcgctacgctgtagaagaaattccaggtatgactgcaggctttgccgctaactatttaaccggaaccatggtgtgcttctttattggtcgtttcaccggtacctggctcatcagtcgcttcgcaccacacaaagtcctggccgcctacgcattaatcgctatggcactgtgcctgatcagtgccttcgctggcggtcatgtgggcttaatagccctgactttatgcagcgcctttatgagcattcagtacccaacaatcttcagcctgggcattaagaatctcggccaggacaccaaatatggtagctccttcatcgttatgaccattattggcggcggtattgtcactccggtcatgggttttgtcagtgacgcggcgggcaacatccccactgctgaactgatccccgcactctgcttcgcggtcatctttatctttgcccgtttccgttctcaaacggcaactaactgaacatattttccgaataaagtgaggaatctgtaatgaaaaaaatcagcttaccgaaaattggtatccgcccggttattgacggtcgtcgcatgggtgttcgtgagagccttgaagaacaaacaatgaatatggcgaaagctacggccgcactgctgaccgagaaactgcgccatgcctgcggagctgccgtcgagtgtgtcatttccgatacctgtatcgcgggtatggctgaagccgctgcttgcgaagaaaaattcagcagtcagaatgtaggcctcaccattacggtaacgccttgctggtgctatggcagtgaaaccatcgacatggatccaacccgcccgaaggccatttggggctttaacggcactgaacgccccggcgctgtttacctggcagcggctctggcagctcacagccagaaaggcatcccagcattctccatttacggtcatgacgttcaggatgccgatgacacaagcattcctgccgatgttgaagaaaaactgctgcgctttgcccgcgccggtttggccgtcgccagcatgaaaggtaaaagctatctgagcctgggcggcgttagcatgggtatcgccggttccattgttgatcacaacttctttgaatcctggctgggaatgaaagtccaggcggtggatatgaccgaactgcgtcgccgtatcgatcagaagatttacgacgaagccgaattggaaatggcactggcctgggctgataaaaacttccgctatggcgaagatgaaaataacaaacagtatcaacgtaatgccgagcaaagccgcgcagttctgcgcgaaagtttactgatggcgatgtgtatccgcgacatgatgcaaggcaacagcaaactggccgatattggtcgcgtggaagaaagtcttggctacaacgccatcgctgcgggcttccaggggcaacgtcactggaccgatcaatatcccaatggtgacaccgccgaagcgatcctcaacagtagttttgactggaatggcgtgcgcgaaccctttgtcgtggcgaccgaaaacgacagtcttaacggcgtggcaatgctaatgggtcaccagctcaccggcaccgctcaggtatttgccgatgtgcgtacctactggagtccagaagcaattgagcgtgtaacggggcataaactggatggactggcagaacacggcatcatccatttgatcaactccggttctgctgcgctggacggttcctgtaaacaacgcgacagcgaaggtaacccgacgatgaagccacactgggaaatctctcagcaagaggctgacgcttgcctcgccgctaccgaatggtgcccggcgatccacgaatacttccgtggcggcggttactcttcccgcttccttaccgaaggcggcgtcccgttcaccatgactcgtgtcaacatcatcaaaggcctgggaccggtactgcaaatcgcggaaggctggagcgtggaattgccgaaggatgtgcatgacatcctcaacaaacgcaccaacagtacctggccaaccacctggtttgcaccgcgcctcaccggtaaagggccgtttacggatgtgtacagcgtaatggcgaactggggcgctaaccatggggttctgaccatcggccacgttggcgcagactttatcactctcgcctccatgctgcgtatcccggtatgtatgcacaacgttgaagagaccaaagtgtatcgtccttctgcctgggctgcgcacggcatggatattgaaggccaggattaccgcgcttgccagaactacggtccgttgtacaagcgttaatacattactccctgatgtgatgcccggtcgctccggctaccgggcctgaacaagcaagagtggttagccggataagcaatgttatccggctatattgcaggagcgattatgaaacaagaagttatcctggtactcgactgtggcgcgaccaatgtcagggccatcgcggttaatcggcagggcaaaattgttgcccgcgccagtacgcctaatgccagcgatatcgcgatggaaaacaacacctggcaccagtggtctttagacgccattttgcaacgctttgctgattgctgtcggcaaatcaatagtgaactgactgaatgccacatccgcggtatcgccgtcaccacctttggtgtggatggcgctctggtagataagcaaggcaatctgctctatccgattattagctggaaatgtccgcgaacagcagcggttatggacaatattgaacggttaatctccgcacagcggttgcaggctatttctggcgtcggagcctttagtttcaatacgttatataagttggtgtggttgaaagaaaatcatccacaactgctggaacgcgcgcacgcctggctctttattagcagcctgattaaccaccgtttaaccggcgaattcactactgatatcacgatggccggaaccagccagatgctggatatccagcaacgcgatttcagtccgcaaattttacaagccaccggtattccacgccgactcttccctcgtctggtggaagcgggtgaacagattggtacgctacagaacagcgccgcagcaatgctcggcttacccgttggcataccggtgatttccgcaggtcacgatacccagttcgccctttttggcgctggtgctgaacaaaatgaacccgtgctctcttccggtacatgggaaattttaatggttcgcagcgcccaggttgatactagcctgttaagtcagtacgccggttccacctgcgaactggatagccaggcagggttgtataacccaggtatgcaatggctggcatccggcgtgctggaatgggtgagaaaactgttctggacggctgaaacaccctggcaaatgttgattgaagaagctcgtctgatcgcgcctggcgcggatggcgtaaaaatgcagtgtgatttattgagctgtcagaacgctggctggcaaggagtgacgcttaataccacgcgggggcatttctatcgcgcggcgctggaagggttaactgcgcaattacagcgcaatctacagatgctggaaaaaatcgggcactttaaggcctctgaattattgttagtcggtggaggaagtcgcaacacattgtggaatcagattaaagccaatatgcttgatattccggtaaaagttctcgacgacgccgaaacgaccgtcgcaggagctgcgctgttcggttggtatggcgtaggggaatttaacagcccggaagaagcccgcgcacagattcattatcagtaccgttatttctacccgcaaactgaacctgaatttatagaggaagtgtgaaatgctgaaaacaattagcccgttaatttctcccgaactattgaaagtgctggcagagatgggacatggagatgaaattattttttccgatgctcactttcccgcccatagcatgggaccgcaggtgatccgcgctgatggcctgttggtgagcgacttgctccaggcgattatcccgttatttgaactggacagttatgcaccgccgctggtgatgatggcggcggtagaaggtgacactctcgatcctgaagtagaacgacgttaccgtaatgcgcttagtctacaagccccgtgtcctgacatcatccgcatcaatcgttttgcgttttatgaacgggcgcaaaaagcctttgcgatcgttatcacaggcgaacgagcgaagtacgggaatattcttttaaaaaaaggggtaacaccgtaatctcataccggtacgcccgcatgacgcgggcggttatcgaatgatggggtgaaaaatatgaaagcggcacgccagcaagcgatagtcgacctgctgctgaaccataccagcctgaccacggaagctctctctgaacagctaaaggtcagtaaagaaaccattcgtcgcgatctcaatgaattacagacgcagggtaaaattctgcgcaatcatggacgcgctaaatatatccaccgtcaaaatcaagacagtggcgatccctttcacatcaggctgaaaagccattatgcgcataaagcagatatcgcgcgcgaggcgctcgcgtggattgaagaagggatggtgatagccttagacgccagtagtacttgctggtatctggcacgccagttgcctgacatcaacattcaggtcttcaccaatagccatccgatttgccatgaactcggtaaacgcgaacgcattcaactgatcagttccggcggcacacttgagcgcaaatatggctgttacgtcaatcccagcctgatttcccaacttaaaagcctggaaatcgatctgtttattttttcttgtgaagggatcgatagcagcggcgcactgtgggactccaatgcgatcaacgctgattacaaaagcatgctattaaaacgtgccgcgcaaagcttgttattgattgataaaagtaaatttaatcgtagtggggaagcccgcatcgggcatctggatgaggtaacgcacattatttctgatgagcgccaggttgcaacttctttggtaacagcctgacggaaagggtagcaggccggagacgacgccccggccttgcctgttatcgctcgtcgcgacgaccacccaccgcagcccagatgcggcggacgtgcaccgtcacttcttcgcgatcgtgatacaactgccgcgcctgaatctgagcatttatgccatgttcatcaagctgtgcctgaatatacgccagattgtgactcacttcttcgtagcgttttttcatcggcagtttgaggttgaaaatggtttcacggcaccagccattaaccagccactgtgccatcaatgccgcaactttcgccggtttttcaaccatatcgcataccatccaggagatattgctgcgcgtcggacggaatttgaaaccgtcttcccgcagccacgtcacctgtccggtatccatcagactttgcgccatcgggccgttgtcgacggaataaacccacatgttgcgcttcaccagttggtaggtccagccgccagggcaagcgcctaaatccaccgcccacatcccgttcgccaggcgttcatcccactcatccgcaggaataaacacatgaaatgcctcttccagtttgagcgtggaacgactcggcgcatctgccggaaatttcaggcgcggaatgcccatatagaacgggctattattgttgctgtaactgtaaccggtatagcagcagcctggtgcaataaagaatacatgcacaaccggacgcttcggcgtttcatagttcgccagcaccccggcatcgcgcaaggcagcgcgtagcggaacagtaaatttacggcagaatttcagtaactctttgctttcgttggtatcggcaacttcaacacgcagttcaccgcccttctctactacgccctgtaacatgccgacaatgggggtaatacgatcttctggcggcaaatgctgcaggagttcccccaccacaaaccactggcgggcaaaaattaaactactgaacggcagctcacggattaacttatcgccatcatcaggttgataacattcataaatgacataacccgcattctctttcacgcgggcaaaaccgaaaatttcccgctggccggctttatcggtaatttctgcggcgcactctttttcaaagcccggacggcacagcaatacaaccttattcatgacttacgcccttgcgctttaaacggatagcaccaactaacattaacgcccagcccgcgaggaagctcacgccgccaaccggagtgacaaacgcccacaaacgcagatgggacagcgccaggcaataaaggctgccgctgaacaacaccgtgcctaacgcgaggaaaacgctactccagtaaaaccagatactgatgcgacgctgcattgccaccgccagacctaagatcgccagcgtatgaaacgcctggtattcgaggccggtctggatccagcccatctcaacggcccccatggttttacttaacacatgcgcgccaaaagcgcccagagccacaaaaatgaagccgctaatggcggcgaaaatcagcataaaacggctggtcatggtcgtaccctacgtaaattattgttcataacgaaagcggaatttttcttgttcagcagcggctttcgccaggatccattggcgaaaggcggctattttacccagttctgcctgactgtcatgacaaaccagataaaaagcatttttactgaccagaacatcattaaacgggcaaacaagacgtccggcctcgatttcagattgcgccatcacgttatttgccagcgccactccctgcccgtggatagccgcttgcagcaccatggcgctatggctaaaaattggcccttgctgaacgttgatatgatttaaccccaactgtcgggtatatgtctgccagtcacggcggctagcatcatgtaataacgtatgtttagccagatcttccggtgtcttcaagggtttttcgccagtcagcagtagcgggctacacaccggcaataaatattcggcgtacagtttttccacccgtagccccggccagttgccccgaccataaaatatcgccacatcaacatcatccgccagcttatcttcctgacgatcaaccgcctggattcgaacgtcaattcccggataagcactattaaagctggaaagtcgcggaaccaaccaatgaatggcgaaactggggagtaaactgaccgtcaacgcccccttggcgctacgggcctggagtttacgcgtcgcttcggttaattggctaaatatctctttgatatcgaggaaatagctttgcccttcctcggtcagcaggagactacgattacggcggcggaacagttttagccccaaaaaatcctcaagagacttgatttgatgacttactgcggcttgggtcacaaaaagctcttctgctgcgcgagtgaaacttaaatggcgtgctgcggcatcaaaaactcgtaaggcatttagcggtggtaatcgtttagacatggctattaaactttgatgttaaatgaatttaacaattagatcacactatgtaacctattagtttttttaatctgagccattataaattgtccgttgagcttctaccagcaaatacctatagtggcggcacttcctgagccggaacgaaaagttttatcggaatgcgtgttctggtgaacttttggcttacggttgtgatgttgtgttgttgtgtttgcaattggtctgcgattcagaccatggtagcaaagctaccttttttcacttcctgtacatttaccctgtctgtccatagtgattaatgtagcaccgcctaattgcggtgcttttttttaccttgcgatcgcgaattactgatccagttcgaccatctctttcacgtcagtacggttgatctgctgtttgttgccattagcgtctttatagctaatcataccggtatcgttatcagtctgtggtttgccgtcagagacgatggtacgtccgtcattggtgtgcatcacatagttgctaccggaacaggcgctcagggcaaaagtcagcatacaggcagaaataattgcggcagtctttttcatcatcttctccttaaagcgattaataaatcttaatagtattgattaacaggctaaaattaacgcctaacactattcagcatatgttacttacgcggcttcgccaggatatccagataattctgatggttagcactctccttgtatcaaagtgaattttgcgtcacgatcggtgcatcaagccgaggagtaccatgaacgtttttaatcccgcgcagtttcgcgcccagtttcccgcactacaggatgcgggcgtctatctcgacagcgccgcgaccgcgcttaaacctgaagccgtggttgaagccacccaacagttttacagtctgagcgccggaaacgtccatcgcagccagtttgccgaagcccaacgcctgaccgcgcgttatgaagctgcacgagagaaagtggcgcaattactgaatgcaccggatgataaaactatcgtctggacgcgcggcaccactgaatccatcaacatggtggcacaatgctatgcgcgtccgcgtctgcaaccgggcgatgagattattgtcagcgtggcagaacaccacgccaacctcgtcccctggctgatggtcgcccaacaaactggagccaaagtggtgaaattgccgcttaatgcgcagcgactgccggatgtcgatttgttgccagaactgattactccccgtagtcggattctggcgttgggtcagatgagcaacgttactggcggttgcccggatctggcgcgagcgattacctttgctcatagtgccgggatggtggtgatggttgatggtgctcagggggcagtgcatttccccgcggatgttcagcaactggatattgatttctatgcttttagtggtcacaaactgtatggcccgacaggtatcggcgtgctgtatggtaaaagtgaactgctggaggcgatgagcccctggctgggcggcggcaaaatggttcacgaagtgagttttgacggcttcacgactcaatctgcgccgtggaaactggaagctggaacgccaaatgtcgctggtgtcataggattaagcgcggcgctggaatggctggcagattacgatatcaaccaggccgaaagctggagccgtagcttagcaacgctggcggaagatgcgctggcgaaacgtcccggctttcgtagtttccgctgccaggattccagcctgctggcctttgattttgctggcgttcatcatagcgatatggtgacgctgctggcggagtacggtattgccctgcgggccgggcagcattgcgctcagccgctactggcagaattaggcgtaaccggcacactgcgcgcctcttttgcgccatataatacaaagagtgatgtggatgcgctggtgaatgccgttgaccgcgcgctggaattattggtggattaatgacaaacccgcaattcgccggacatccgttcggcacaaccgtaaccgcagaaacgttacgcaataccttcgcaccgttgacgcaatgggaagataaatatcgccagttgatcatgctggggaaacagcttccggcattgccagacgagttaaaagcgcaggctaaagagattgccggatgcgaaaaccgcgtctggctgggatatacagtggctgaaaacggcaaaatgcatttctttggcgacagcgaagggcgcattgtgcgcggcctgctggcggtgttgttgactgccgttgaggggaaaaccgccgccgagttgcaggcacagagtccactggcattgtttgatgagctgggattacgtgcgcagcttagcgccagtcgcagccaggggttaaatgcgttaagcgaggcgattatcgctgcgacgaagcaggtttaagcacagaaccgggtcggataagacgttcgcgtctcatccgacctgattgtttaaccctgacgcgccgctttcgccatcatcttcttcagcgcatgagaaaccgcaacaaacccaaaggtggcggtcaccatcgttgccgcgccaaatccagatgcacaatccatccgcttcggcccttctgccgtggctttcatcgcacacaccgtaccgtcactctgcgggtacaccagcgcttcagtagaaaacacgcaatccacgccgagcttacctttactgtttttcactacgccaaaatcgcttttcaggcgctcgcgcaacttcgccgccagcgggtcctgaatcgttttcgccagatcggtaacctgaatctgcgtcggatcaatctgcccacccgcgccaccggttgtgaccagtgggattttattgcgccgacaataagcaatcagcgccgctttgggccgtacactatcaatggcatcaatcacgtagctataacccacgctcatatactgcgctacgttatccggcgtcacgaaatcatccaccaccgttacacggcactccgggttaatctggcgaatacgctccgccataacttccgcttttgccagcccaacgttatcgcgcagggcatgaatttgccgattggtattggtgacgcacacatcatccatatcgataagcgtgattgcgccaatccccgtgcgcgccagcgcttccgccgcccaggaaccgacaccaccgataccaaccacacaaatatgcgcgtcagcaaacagttgcaacgctttttcaccatacagacgcgctgtgccaccaaaacgctgacgccatgcatcactaattaccacagacatagcacctcagaattaaaaagggcgaggttatccctcaccctaaacgcataaatgcctgatgcgctacgcttatcaggcctacataactcctgcaatattttggatttgcatgatttgtaggccggataaggcgttcacgccgcatccggcatgaacaacgcgcacttagtcaataatcaggatgtgaggttacccctcaccctgtcatatccgtaaaaacggcatacagaatatcacatcagccgctaaagacgttacctgcgcccggggcggttttcagcacccagacacgtccatagtggttgtaccaacctgcgcggtgtccggcttccggcccgatcccttgatagatatcgaagtgttggcctttgattgcaccaccgacatccagcgccaccatcagacgcagttcgtactgaccattaaatttgccgttattatccagcaacggcacttctgccagcaaggtagtacctggcggaataatggaacgatcagaggcaacactcgcgcgaccaaccagcggcaccgcacttgcccctttcaccggagcaaaagattgcggtttaaagaagacgaaagacgggttctgttccagcagctcgcgaacctcggcttcactgtgtgtttcgccccagtgacgaatcgcctgcatgctcatatcttcttttttcacttcgccacggtcgatcagcaccttaccaatgctgcgataggcatgaccgtttttccctgcatagctgaaaaagttaagcggactgccatcaccaaagtcgatatacccactaccctgcacatccataatgaagttatccatcagggagttactgtaagcgagaatatatttatcactcaatgcccccgcgtagatctccgcacgagacggcagacgaccacgttttggcggcatacggtaaataggatactggaactcgccctggcgggtatggcgcgcctgaattaccggcgtgtaataaccggtaaactgcacgttaccatagttgtcggcaccttccatctgccaggcatcaatgccgaactggcgcatattgcgggtatcaccgcctgcgcgcagccactcttgcaccgcgttataaacattactctggttgccatacagacgcggactgctattacggatatggttaatttgctcggcaaaatcaccggcgttaatcggcgcgccaacggcatctggctggttcaccagagagaaaggctgggtaaatttcccgtctttatattgctgtccgcgatcggttggtttggaagagcaggcggcaagcattgccacaaccgtgcccataagaaggtactttacccaacgtcctttcattgttctcttcttcaggttaaaaaataaggcgcaacgaagataacaaaccgccgcgtttaatgaaatgagcagcctctccctgacgcaaattttgcacaaaaaataggctttagtgatttgtttttgttcaaaatcatgccaaatccgtgatcggggtaaaaaaaaggttgcatgaaaacgcgagcggagtatagtgcgcatccacggacgcggggtggagcagcctggtagctcgtcgggctcataacccgaaggtcgtcggttcaaatccggcccccgcaaccaattaaaatttgatgaagtaaagcagtacggtgacgcggggtggagcagcctggtagctcgtcgggctcataacccgaaggtcgtcggttcaaatccggcccccgcaaccaatcaaatttgatgaagtaaaagcagtacggtgacgcggggtggagcagcctggtagctcgtcgggctcataacccgaaggtcgtcggttcaaatccggcccccgcaaccaattattgaacaccctaacgggtgtttttttgtttctggtctcccataaaaaagcgccattcagcgcctttttatcatccccttctcgccagcgtcgccccatcggcaaaatacgctttaatccccgcaagaatagactccgcaacttcctgctggaaagtcgccgttttcagtttacgctcttcctcaacgttactgataaacgccgtttcgaccagaatggagggaatatctggtgcctttagtacggcaaacccggcctgttcaacttgatttttatgcagcttgttgattttaccgagcttattcagtaccgctttaccaaacttcaggctgtcggcaatggtcaggctctgtaccatatcgaacatggtgtggtcgacatagcggtcaccgcttttgctcacgccaccaatcaagtcgctggcgttctgggtttgtgccagatattttgccgcagtactggttgcacctttggtactgagcgcaaacacagaggaaccgctcggctgacgactggtaaaggcgtcggcatggatagagacaaacaggtcagcacgctgtttctgggcttttgctacgcgcacttgcaatggaatgaagatgtcttcattgcgcgtcatgtacaccttcatattgccctctttctcgatcagagagcgcaaacggcgagctatttgcaataccacatctttttcgcgcgttttgtatttccccaccgcaccggagtcttcgccaccgtggccagggtcaagcataatgacaatcggacgatcgcgccctgctttacccggttgtggaccactttgcgctggcggcacctgcttttcgaggtcgcctttgttgtaatcctccagcagcgccagcagcgggtcctgcatatcctgtgcattggccggatagaggtccatcaccagacgctctttaaacccggcgaccggcgcaagggcaaacagctgcggttttacgttttgctttaattcaaaaaccatccgtacggtttgcgggtcaaattgcccgacgcgcgcgctcttgatgaacgggtcgtctgcacgaatttgtgccgccatccccttgagtacgctgttcaggtttacatcttcgatatccaccaccacgcgttcagggttactcaacgcgaactgcttatatttcagctgacgattactttccaccgtcacgcgggtgtagctggacgcaggccagacgcgcaccgccacgacctggctgaccgcagccagactgacctgacttacgctcaatagccacatggcacccgcgccttgcagtaaacgacgacggctgattgcagtgttggatccactcatgcctctcccgagcaaaagaaatctaagctgtgtaacaagtaaacgactaatttgaccggaaactttagcgaaagacgcataatctgtcatctaataaacggtaaacattctttttatattcacggcattactgataaaaaagtcgctctcgcataaaatttacacttgcaccctgcgaaaaaacagaataaaaatacactaatttcgaataatcatgcaaagaggtgtgccgtggtaaaggaacgtaaaaccgagttggtcgagggattccgccatagcgttccctatatcaatacccaccggggaaaaacgtttgtcatcatgctcggcggtgaagccattgagcatgagaatttctccagtatcgttaatgatatcgggttgttgcacagcctcggcatccgtctggtggtggtctatggcgcacgtccgcagatcgacgcaaatctggctgcgcatcaccacgaaccgctgtatcacaagaatatacgtgtgaccgacgccaaaacactggaactggtgaagcaggctgcgggaacattgcaactggatattactgctcgcctgagcatgagtctcaataacacgccgctgcagggcgcgcatatcaacgtcgtcagtggcaattttattattgcccagccgctgggcgtcgatgacggcgtggattactgccatagcgggcgtatccggcggattgatgaagacgcgatccatcgtcaactggacagcggtgcaatagtgctaatggggccggtcgctgttagtgtcactggcgagagctttaacctgaccagcgaagagattgccactcaactggccatcaaactgaaagctgaaaagatgattggtttttgctcttcccagggcgtcactaatgacgacggtgatattgtctccgaacttttccctaacgaagcgcaagcgcgggtagaagcccaggaagagaaaggcgattacaactccggtacggtgcgctttttgcgtggcgcagtgaaagcctgccgcagcggcgtgcgtcgctgtcatttaatcagttatcaggaagatggcgcgctgttgcaagagttgttcagtcgcgacggtatcggtacgcagattgtgatggaaagcgccgagcagattcgtcgcgcaacaatcaacgatattggcggtattctggagttgattcgcccactggagcagcaaggtattctggtacgccgttctcgcgagcagctggagatggaaatcgacaaattcaccattattcagcgcgataacacgactattgcctgcgccgcgctctatccgttcccggaagagaagattggggaaatggcctgtgtggcagttcacccggattaccgcagtagtagtaggggtgaagttctgctggaacgcattgccgctcaggcgaagcagagcggcttaagcaaattgtttgtgctgaccacgcgcagtattcactggttccaggaacgtggatttaccccagtggatattgatttactgcccgagagcaaaaagcagttgtacaactaccagcgtaaatccaaagtgttgatggcggatttagggtaagcgatgaaaatcgtcggatgcgacatgcgtaacactcgtacgtcgcatccggcaattacgtttattcccgactactaaacaacgccgccagaccactgcgccgctcagtacgagtggcgattgccgcacttaatatgcgctcatcggcatacaggctcagacggcgacgcgcgcgggtcaccgcggtataaaccagctctcgcgttactaccggcgtgcgttggctcggcaaaatcaacgccgcatggtcgaactcgcttccctggcttttatgtaccgtcatcgcccacgtagtttcgtgctctggcaagcgactcggttgcacagacttaatattgccgtccggcatcgcaaaccagacgcgcgtcccctgcccgcgatccagcgcaataccgatatcgccattaaacaacccaagcgcgctgtcattacgggcaatcatcaccggtcgaccttcgtaccaacgagagtgcggatgacgatgaattttgcgcttctgttgcataaactgctcaattcgctcattcagtccagccacgccaaacggcccttcccgcagggcgcacaaaagctggtactcattgaacgcctgaatgattaaatccggctcggcacgcgcttgcagcagatccagataacgtccgtaacccgcaagagcttcctcaagcatcgcaatataatcttcgccgctctgtaaaagccgtttttcgatatcagtaaaatcctgctgaaaaacggttttcactgccgttttatcaccacggttgatcgccgcagctaactgaccaatgccagaatcgctgccgaaacgatagcttttttgcagcaggcagagactgtcgcgcaaagatgccgcttctgtgccggttcctgccggaacgtgagtccccgtcaggcggcttagctgcctggcacgctcggcggtaaagcccgcgttggcataagcgcagatatcgcccagcacagccccagcctcaacgctggccagttgatcacgatcgccgagaaagatcactcgcgcatgatcgggcaaggcgtcgatcagtctgctcatcataggcagatcgatcatactcgcttcatctaccaccagcacatcaagatgcagcgggttaccggcatgatgacgtaaacgctggctacccggctgcgcgcccagcaatcggtgcaaagtgctggtatcttccggaatgcgtttcttttgttcatcggtcagcggtaactgtcgcaaagccttgccgagagattcggttaagcgcgcggcagctttacccgttggtgcagccagacggatacggcagcgttcgccgtcggccatttgaattaacgctgccagcaacttcgctacggtggtcgttttaccggtgccagggccgccggaaatcacgctgatccgccgcgtcagcgccactgccgccgcaactttttgccagttaatttcatcgcttactggaaaaagtttgtccagggtttgcgccagtagagcttcatcaacctcaatggcatgattcacttcgttgaaaaagcgtgccactgtgcgctcgttacaccacatgcgattcaaataaagacgatcgccacagaggatcatcggcgtgggttcatctcccctgctgaccgcttgagaagccagcaagcattcttcccaattttgtagctcaccgatttcactgacacaggtcgccaacagcggatggctcgcctcgttattttccagtcgactaagcggcaaacaaacgtgtccctctccggcatcatgacttaacagtgccgccgcgagggtgacggcaggatgttcatctcccgccacggtcagggcaaattgcacatccagcgggcgtagctgtttgtgctccacagcttccagtaattgcttttgcaatttcattacgcctcctccagggtcataccggcaaacatctcatccatcagggcaatcaacccggcgttgggtcgggttgtgtaaatcccctgttgcggatgttctttatcaacgccacgcaggaacagataaataacgccgccaaagtggtgctcatagtcgtaatcagcaatgcgatggcgcagataacgatgcagcgccagggtataaagctgatattgcagatcatagcggtgtgcctgcattgccgctgccatagcctgttgggtgtaagcgctactgtcttcacccaaccagttggatttatagtcgagcaggtaataacgcccttcgtggcggaacaccaggtcgataaagccttttaacatgccacgtacctgcatgaactccagcggcgggcagcctgcggatagcgggtcaaactggcggattaacgtatcaagctgactggcgataagcggttcactaatcggcagataaaactccatctccacctgtttattgcgggcggaaagttgactcaggcttacgccggtttcattgagaggtgcctggaggacagccgtgatccactcggtcaataccggttcccactggctttcaaagccgccgagttccagtttttcccgcacccagttcgggtcaaccggctgggtaaaatccaggtcttcaaacaaactgtgcaagaacgtccccggactcgcaccgcgcggaaactgatgtggtgttaacgtcggttcttcaacgacgctggcaacgcctgcagcatcgacatccagccgaggcatcaaatcctgggcgataccgtgaccacgctgttgcaaaccagagtagctggtgacgcgccagttatcgccgggcaatcgttgtaacgtcttcgcattcagctctgctgtagaaacatcattaacctgccagggttggttatcaccagtttgtgccgtttgccaggcaatatcatcatcgcataacgcttcaatacaggtgcgaagccctgccgcatcttgcggttcccctttttgcagcaaacgcccgagcgcactttggtggacgtcggtgtcaccttttttatcgccacgacggcgcaccagcggtgcaacgccgagactgcaatgccaaacgctacgtgtcagcgccacgtaaagcaaacgcagatcttccgccagacgttcggcctccgcgaggtcgacgctttctggcgcagcattaagatccagaactgcctcaaagctgtggcgatcgtgataaaacgcctgctcctggacgcggaaattggtgataaacggcagccagaccaatggatattccagccctttgcttttgtggatcgtgacaatctgcaccagatgtttatcactttcgagacgcatttgttggctggaggcattactgtctggctcgaggatatgttggcttaaccagcgtaccagcgcatgttcactttccagctgcgttccggcttcttgtagcagttcgctgatatgcaagatatcggtaagacgccgctcaccgcctgccgttgccagcaagttttcagcaatgttacgcgcgctcatcagcgcccgcagcatcggcataacgccacgtttgcgccagatttgccgataaccatcgaactcttcgactaccacatcccacgcatgttcgtcattgttcagcgtttcgatatccagcgcgttcagccccatcatactcgttgccagcgcactacgcagggtgttctcacgttcgggcgtcatcaccgcctgcaacaaccaaagcatttcctgcgcttccagagtttcaaaaacactgtcgcggttgctaaggtaaacggaagggatttccagcaacgttaaggcatcgcgcacctgggcggcctcctggcggctgcgcaccagcacactgatgtcgctagcacgcaccggacgcgcgtcgtcgccgttcatcagcaacgcttcgccccgctgtccggcttgtagccagtcgcggatttgcgcagcacatacctgcgccatggtactttgataatcgccaacgccgcagctttcgccttccatcagccacattttcatcgcaggctgtgtttcacctttaaatacaaaacgtaacgcctgatttttcccggcacttttcactggaataaacggtatttcgcgaaacatgaacgcgtcatcagtctggctgaaaagcttattcacgctgttcaccattcctggtgcggaacgccagttggtgtctaaagtgtagtgggcgtgaacttcgctacgcgccttcatataagtgaagatatccgcaccccggaatgcatatatggcctgcttcgggtcgccaattagcaacaatgcggtttccggctgatggtgccagatacggcgaaaaattcggtactgctgggggtcggtatcctgaaattcatcgatcattgccaccgggaatcgcgtacggatcgccgctgccaacacctcaccgctttcgctacgcagcgcggaatcgagccgacttaacatgtcatcaaaacccaattcgccacggcggcgtttttcacgcgctactgtttcgcggatctcagccaatgcgcgggtgatcaccagatcgcggatgctcaatggttctgcaagcagttgatcgatcgcctcaaacagtggatgtcgcggggtttcccccccggccttcgtgcgatcttctaagaaacgctgggagaatttttccaggctctccggcaactgataactgtttgtctcttcttctgcccaggcgctgatcttgtcgatccatttagcctgattgctacggttaaacttgcgtcgatcaataccagaagattcgatcagcgcatccagttcacccactgcgtcgcgccactgctgttttaccgtatcaatacgcgccacaatttgcgcgtgacgggaagccagcgtttcatcatcgggcggcggtgctttgataaccggcgcttcgccttgcagataacgattaatatcgcgcagcaacgcctgcggccctttccaggtttcaaagacgacctgggctatttcacgcggcagcgggtagcagtggcgacgccagaaatcggcgcaggcctggtagcgtagcagagactcatcttcaatcagctgctgctcaaacagcatgccggattcaaaggcattcaggttgagcatgcgctggcaaaagccgtgaatagtaaagactgccgcttcatccatctgccgttcggctaacaacaaccactgcgcggcttgcgctttatcgtcgatctcttccagcaggcgttcgtacagtggattgtcggtggtttcacgcagacaggcgatgcgcaactcgtggatattgctacggatacgaccgcgcaattctgccgtggcagcctcggtaaaggtgaccaccagcagttcttcaacggtcagcgggcggggaaaggcggcggaaccgcctagtccaagtaacaggcgcaaatagagcgccgcaatcgtaaaggttttgcctgtgccggcagaggcttcaatcaggcgctcaccctgtaagggcaagcgcaaaggatctagtgtctcggcgacatcactcattcttttcactcatcaggggcattgtttgctgcaacgcgctgacgttctcccacactttccagccttcagggtgtacatattcggctttcccgttctggctgccggaaatctggctcagaatagccatgccttgcggctcgaccaccgcctgatggaagaaatcagcaagtttttgcggcgtcagcagttttatctgggccacgattttatcacggctatcgaagcgcatattgccgcgatcgaaatctttacttaacttgcttgcttcttcgccgagcgtttgcggtgcctgcagcatctgggtaattaccgcctgctggatttgcgcaaactcatctggcttcatcgctcgcaattttgcctctgcggttgggaaaaacgccttgtaacgctcccacaagaaactaggctgtttatcattgctttgcaaaaggaagcccatgccccactgacgccccacgctcattggaaacgcaaacacggcatagcccaattgttcttcggtacgcaactgattgtagaaccacggctgtacgatctgccccaacagagagctataggcactgctggtgtattcatcgtagccagtcggtacaaataccgctgccagtgcggagtcggtgctgttaccggctttttcaaagatgacggattgttttttatcgaccactacatctttgtttcgacaccactcactaccatcagcgcccaactgtttttgcacatcgcgtgccagcgttgttgcctgggcctcggtcatgttgccgataaccataaactctggtcgagccccactttttaaggcgtcgcgataggccagcacctctttcaacgtaatggagggcaaaattttacgccgttcatctcggctgaagtacggcacttggctgagcatctgcgcgggcataatcgcctgctcaaacgctttacccttttctgcggaatccatcatctggttataccaggacttcgcctgctcaagctgatcttccgtagcggtatagctaaagtacccctcgagcaatgcctggaacagctgcggcagacgctgggtgtaaccattagcattaaccataaggccgttgttagcgttggtggaaaaacttatgccaccaacgctcgcctggttgcttaactgatcaagcgccagccctgcgagataatcattgagcgcaaacatcacctgattgcgggcgctgtccatggctttcggattacgcaaaatcaggctgacatcagctttgggctcgctggcaaaataacggcttggcgcatacaccacgcgcagattgctctcatcaacaatcagctctggatggtcgtatttcttctcactcttaatcaggctgaaatcatcaggaatataagggttaagctctggcaaagagagcgcaatgtcggcggcttttttctgccagtcggcgaaagtttgtgcgctgattttatcgacctgatacggcgcatcgacaaagtaagccgttttgttgtgcggctctttcgggctgatataccagatacgcgcattctgcggcgtcatcatcgccagacgttcctttactgctttagcatcgtaccgatcggcaatattgactgcatccagcgtatgctcaacaggaacgcgaatcatggtatctgccagccattcgacgtaatccatatcacgggtgatgctcggataacggaagtcgatatccagcacattcgccagttcatcgaagtattgtttatcaatgcctttttcacgtaacagattgagatagctaaaaattgccgccacaacctgatcgcgattagccaggcctttatcggttaaagacgcagagatcgctaatacgccgctgttgccgttgacgataggatcggagttggcgctaatgccctcaactaatccctgcttttgcagccagtcagaaagtgtacctgggctgcgattgccaatcagataggtaatcaattcatcggttttactacggaacttcgcactgttgttatcgatgcgaaactcaacgcgcaacactttacgcggcagcgcagggacgtaatgaatgataatgcccttttgcgcgtcggtgactaccggcacggtgatttccggttttttgctctctttgttcggcacgcgaccaaaggtgtccgccgccatttttgccaactccggcagcggtttattactgtaaataaccgccttcatcaaattggcggaatagtacttctcgtggaaatctttcagcgcctgctgcaccggattaccaggtttgtcgcttaaagtttcgaggttaccaccagaaaacttactaccggggtgtgccgggttaatggtttctgcgctgacctgtgccatgcgcatcccgtcacgcgtacgcgccatggttaattcagcgttcaccgcattacgctcacgttcggcatatttcttgtcgagcaaaggttcagcaatagcatcggccaggcggtctaccgcaccaggcaaggcgtcgttctcaacttccagatagaaagccgtgcgatacggcgcagtgctggcattgtgactaccgccgtgcattttgagatattcggccagactgtcagcctgcgggtactttttgctccccatcagactcatatgttcaaggtaatgtgccagcccctggtacgcctcgggatcttccaggctcccaacgggcaccaccagcgcgctgaggcttttaactgcctgcggatcagaaaccagcaagaccaccataccgttatccagacgtatagcctgatactggcggttatctttatcacttttacggatggtttcctgaatcggctgccatcccgtttctgcctgacttaagggtgcccaaagggcaactaacaacaataatgctttgaaccaggtgctgcggggcattcacggacctcataatcaacttaattttctgtccagattcaacacgttaacgcaaatcatctgccagaatttaatcttgtgctgcacgagtcagcctatgtttatataaccatcagtccgtgactggtgcgcatcataaagtaagcggatagattgcgcaatttttatacagcactcaactctgattaaagcgaaacagcggtaacaggaaacgttggctctgttcaacgatggcctccattgtctctggtgttaattgccgccagagcctttgataccagatatcatcaccttcgccacgcaccatcatgttgccttcgtaagcctgaaggaatttcgtacgggctttttgcaacgtggaatcgtcatccagcatggcatcgttttgcgcgtcataacaggtttttagccacgcgccgccactttcaggtaacaccagcaatggcgcggacattccttcacgatacccctcaatcagttgactgaggtaatgcaaagcctgttcggctgcaagcggcggaaaacgccactcgccgtctttgcgtagaaaaaggcgactttcaccattaccaccgctggcacagtagacaaggtgttccagccaaagttgcattccctgggccacacttaataaagagggacgccagcgcaacaggccatccggctgcacctgcggcaaccagccagttatctgcacaccgttgcaggcgagatcaatttccatactctgccccggctggcgacaggcaatgactctgtcggcaagctgctgcatctcctggcactgtgtttcccagaaaatttcaccaaaagcgccatacggtaaatcccctgccgctcggaagcggcggaacaagcgttcggcatcatcctgctcaaccagtgcattcaataactgctgattgatttgataacggctaagtccttccagaataaatggctcggtgtcggggatttcgctgtcttcagtacggaagttcacctgcaaacgcatctggaaaaatgcccgcaccggatgtgcccagaatcgttgtagcgtttccagcggcacggtttccggtaaggtaaacggcagcggctgaacaaattcagaatgtgctttaccagcctggctggccgcaggtagccattcacgagcatagctttgtcgttcgcctggctggtagttttgtggatcaaacggcatccgggtatggaggcaagtaagatgcgcttttacccttgcctcgctttcatcacagttgagcgcttcatcgcccggtagataatgactttgcccgatgtagtcgatcagttcctgcaccagtacgctcgggaaacgctcactgttatcctgaatggaacgaccgatatagctgatatagagtttttgctgcgcggaaattaacgcttccaggaacagatagcggtcgtcatcgcgacggctacggtcgccacgcttcggtttctggctcatcaggtcaaagcccaatggcgcaagctgacgtggataaacgccgtcgttcattcccagcaggcaaaccactttgaacggaatactacgcattggcatcagagtacaaatgttaaccggtccggcgagaaaacgctggctgatacgttcttgatccagacgctgtgccagttcatcacgcaatagactcagcggcaccgcgtcgccatactgcgcacctaaaccttcggcgataatcgcctgccattgttgttcgatcagcgtcatcgccgcttcggtttccgcatccggcaggaagaaggcgttgagcatatcgcgacaaaccggcaaccactcttccagcggacgctcctgtgccagcccgcgacgccagatgtttagctgcattagcagactagccagatgccccaccagttctgcaattaagccgctgctttcatcataaggtagaacgctttgccactcgccctgcgcgctctccatcgcgtagcccaacaacatacgcgtcaggccaaatcgccaggtgtgttgtccggtggcggggagttccagctcgcgaacgttgtcgtcatctatgccccaacgaatgccggattcgttgacccactggcgtaaataacgcagcccttcttcggtgatgtcaaaccgcgccgccagcaccggcacatccagcaacgccagcacatcctcactcacaaaacgactgtcaggcagacttaacaggctgataaacgcttccagtaccggatgactctgccgcgcacgacggtcggaaatggcgtaaggtaggtaacgatccgcaggtgcgctaccaaacacagcctgaataaacggactgtagctgtcgatatcagccaccatcacgatgatgtcgcgcggagtaagtgtcgggtcttcctccagcatcgccagcaggcgatcgtgtaaaacttcaacttcacgctgcgggctatggcaaacgtggaaggtgatactgctatccagtggatcaagcgggcgtttgttatcgctacgggaaaactcttcgatgttcacaccagcaacggcgcggttttccagttccagaatgtcagactgaatgttatgcagcaggttatctggcgtgacatcgacaaaggcgtccagctcctggctgctctccaggtcagaaaggagataaatgtagtcgcgcccaagcttaccccaactagccagcagcgggttgccgacatcctgttcaccatcgctgttaaagagctgcccggcattttcgctatcacgaaatagcggcaattcgcgatcttcaaaactgtgtcgacgctgacgggtcagcagtttcgccagataagcaggatctttaatatcgccccagtaataacggcaggggttggtaaacaggagatggatttcaatatgtttacccagcgcctgtagcgcctggagataaacaggcggtaacgcggaaataccgcatataaagacgcggctaggtaaccccggcgggcaggtcgtcgcggactccagcgtttcgataaagcgctgatagagattggcgcggtgccagcgcggttgcccgagttgatgggtatattccaccagcgccttccacaacggggcttgccaggcctgtgcttctcccagcccttcaaccaaatgtcctgtttcccactgtgccagccagtccggacgatagaccagatactggtcaaacaggtccgccgctttactggaaagctggaacagttttcgcttgtcgctatcgtcagtcagataatgccgcaacagggtaaagtcttcgcgctccagcaattgcggcagcagagtcatcagtttccagctcatgctctgtttgttaaaggcgctctctttggggatttccggtaacacccggacgaacatatcccagataaagctcgctggcagcggaaaatcaatgtttgccgcaataccaaacttttggctcagggtcatttgcagccactgtgccataccggtactttgcaccagaatcatctctggttcgaaaggatcgtccagccgttcgcgttcgacaataaactccatcaacgcttccagcacgtccagacgattggaatggtagacccttaacatagcggctcctgattactgacgattcgggcaatgcaggcgggtcatctcgccttctctgcccccgggactaactagcgtaacgctgatgctgacacatcccgcctggcttgtctgcattcggttgacctgccagttggcaggtgggctaatcgcgcgcagttgcgtttgctgccagccatgccgccagagctgttggtactggtttctgctggcaagactgttcattaatgttcgctggaaaccgcttaacgcagtgacaatcatcaccatcaacaccatcgccaacattacctccggcaggctaaagccttgttgattcttcagggaagcactcataacgccctctctttcagcggttaaatcagggaagctgacataacgccctctctttcagcggacaaaaatcgctccagccgcgtgggctaaaaacaatgtttccatcaatgacttcgcctgttcgccacaagctaacgccttcataaccggcaatcaataaggcttcattatctgccagtaaacgcaaacaaacctgggcatcggtttcagcgtactggctgcactgaactgctggctgcgtctgccagcagtgcatttttccccacgccagcgcgctctgaacgatggcctggcggcgcaaactctgactttccatgctcacgcgagaggcaaaactgcgatcctgttggctcattccttgtaatagcaaactacccaaaaccagcagcatcaggaccagagccagactgctaacacccttttcgcggttcacaggttgaatcctgtcacgctatagctggcattcaccacggtttgcggttcagacttactggcagcacgcatattaaccgtcaacaccgggctgaagccgctgacatcctgacgtacgacctgaaaagtgtcgataatgatggcatccggattagtgactttatcccagcccttaccttcacaggatgtcgcaccgcgtagcgtttccagcacatgctccttcagacgaaatccaatctggtcggactcttttaccggttcgcgatcccagataccgttactgttcgcatcccactgcacaatgacacagtcaccctgtccgacaatttccagcccttcgccggtacagatgccatgacaataacccgccctctggagatgcttcgcgacggtaaatacccgcagccagatttcatcttccagcgccagcttacgggtgctcgttaaactttcacgctgtaacgcaggcagaaagcgtgccgcccccagcaacaatacgctactgatcgccatagcaatcaacacttccagcagagaaaaaccttgctcttttacaggcatccttctgtttctccttgctgacaaagccggagtcttccccacgggctaaccaccagccaccactcgcccgtactgtttttgaagcgaatatgcccggcccatgcggtattgcgcaggccaaagaaagcaaggctaggtgtcaggtcgctcatttcgacttcgggccagcgtggcacaaagaccaatggactactgccatgacaggtattggccccagcagcggaactcacaaggcaccataacgtcccctccctgataacgctgatactgtggtcgcggttatgccagttggcatcttcacgtaaatagagcaaatagtcccgcgcctggctggcggtttgccatagccgttggctctgctgccagtattgccagccatagagtccacttgcgcttagcatgaccaaaatcagcatcgcgaccagcgtttcaatcagcgtataaccacgttgtgttttcatgccggcagtatggagcgaggagaaaaaaagacgagggccagtttctatttcttcggcgcatcttccggactatttacgccgttgcaggacgttgcaaaatttcgggaaggcgtctcgaagaatttaacggagggtaaaaaaaccgacgcacactggcgtcggctctggcaggatgtttcgtaattagatagccaccggcgctttaatgcccggatgcggatcgtagccttcaatctcaaagtcttcgaaacggtagtcgaagatggattcgggtttacgtttgataatcaacttcggcagcggacgcggttcgcggcttaattgcagatgagtttgatccatatggttgctgtacagatgcgtgtcgccaccggtccagacaaaatcacccacttccagatcgcactgctgcgccatcatatgcaccaataacgcgtagctggcaatgttgaacggcaggccgaggaagacgtcacaggagcgctgataaagctggcaagagagtttgccgtctgccacatagaactggaagaatgcatggcacggtgccagcgccattttatccagttcgcctacgttccacgcactaacaataatgcggcggctatccgggtcgtttttcagctggttcagtaccgtagtgatctggtcaatatgacgaccatctggcgttggccaggcgcgccactgtttaccatacactggcccgaggtcgccgttttcatcggcccattcgtcccagatggtgacattgttttcgtgtagataagcaatgttagtgtcgccctgcagaaaccacagcagttcatggatgatggaacgcaggtggcaacgtttagttgtcaccagcgggaatccatcttgcaggttaaaacgcatctgatgaccaaaaatggaaagcgttccggttccggtacggtcgtttttctgtgtgccttcgtcgagcactttttgcatcagttctaaatactgtttcatggttcctcaggaaacgtgttgctgtgggctgcgacgatatgcccagaccatcatgatcacacccgcgacaatcatcgggatggaaagaatttgccccatgctgatgtactgcacccaggcaccggtaaactgcgcgtcgggctggcggaaaaactcaacaatgatgcgaaacgcgccgtaaccaatcaggaacaaaccactgacagctcccattgggcgtggtttacgaatatacaggttgaggataataaacagcaccacaccttccagcagcagctcgtaaagctgacttgggtggcgcggcagcacaccgtaagtgtcgaaaatggattgccactgcgggttggtttgcagcagcaaaatatcttctgtacgggagccagggaacagcatggcaaacgggaagttcgggtcaacgcggccccacaattcaccgttaataaagttgcccagacgcccggcaccaagaccaaacggaatgagtggtgcgataaaatcagagacctggaagaaggaacgtttagtacggcgggcgaagataatcatcaccacgataacgccaatcaggccgccgtggaaagacatgccgccgtcccagacacggaacagatacagcggatcggccataaactgcgggaaattgtagaacagaacataaccaatacgtcccccgaggaagacgccgaggaagcccgcatagagtaagttttcaacttcatttttggtccagccgctgcccggacgattcgcccgtcgtgttgccagccacattgcaaaaatgaaacccaccagatacatcaggccgtaccagtgaagcgccacgggtcctatactgaaaatgaccggatcaaactccggaaaatgcagatagctactggtcatctgtcaccacaagttcttgttatttcgctgaaagagaacagcgattgaaatgcgcgccgcaggtttcaggcgctccaaaggtgcgaataatagcacaaggggacctggctggttgccggataccgttaaaagatatgtatatgatccgcgttataaccctccgcgaatcagcccgcccatgccgcgacgctccataaaggctgcaacctgatggcgaacttcggtcgccagttgcgcttccagactacgctgcgcaagattttctgcttcggcataatcaatgcgccgcagcaggtattttgcccgcgctacagaacgtccgttcatagacagatggcgatacccaagcccaatgaggattgccacgcacatgggatcgcccgccatttcaccgcacaaacggagatcgattccatgtatttccgcttcccgggcgatcatcgccagagctcgtaacattgcaggatgaagactgtcataaatgttcgccacccgggtattgttgcgatcaacggccagaatgtattgagtcagatcgttggtgccaacagagatgaaatcgacccgctttgccagatgcggcagcataaataccatactcggcacttccagcatgatgccgatacgtggtttgggaatttcgtaaccgatcatctcctcgacttcacgtccggcacgttcaatcaggcggcgtgcttcatcaacttcatcgaggcttgtgaccatcggcaacagaatattcaggttgcccgtagcggcattagcacgcagcatcgcccgcacctggatcaagaagatctccggctgatcgagcgtaatgcgaatcccacgccaacccaggcatggattctcttcgctgatcggcatgtaaggcagctgcttatctgctccgacatccagcgtacgcaaggtgacgggtttatcattgaacatttgcagcatcccctgatactgcgccacctgttcttcttcgctcgggaaaccactttgcagcatgaatgggatttcagtgcgataaagaccgatgccatcaatacggctgcccagtttttcttcatgttccgggcttaaaccagcattgagcatgacttttatacgctcaccgctttttaactgcgcgggtaaattgacgtcatcttccgccagacggctaagctcaatctcttcactaattagccgctgatattcttgcagcagtaccggctccggatcgaccagcaattcaccgcgatagccatcaacgatcagcgtcctacgatgcagcacgctaggctgaatatccgcgcccatcacggtagggatccccagcgcacgtaccatgatcgcagcatgggagttggctgcgccatctcgcacgacaacaccgactaagcgatcctggggcagctcagcaagcgttgtcgcactcagttcatctgccaccagaatgaaacgttccggccaggcgttcggcccttgattagcgtcatcaagatgaaacagcaatcgctgacccagcgcacgtaaatcgccagcccgctctttgagatagttatcacttagcgcggcaaactgttcggcaaatttttcaatgaccgtttttaccgcccactctgccacgctgcctttatcaacctcggcaaacaattcgcgacgcagccgggtgtcgctaagcaggtggctgtaaagatcgaaaatagccgccgtttctttttgtgcaccggcggcaaagcgtttgctgtagcggcgaaactcgtttgccgcttcttccagcgccccggtcagtcgttcgcgttccagagccggatccagcgtacttgcctgatacacctgttccattaaaggtaacgtggcatcctgccagccttcggcaatcgccacaccaggtgctgccggtaatgcgcggattcgcgtctggcgatattgcccaaacaaggcagtcaactggctctgagaaagaatagctgccatctgggtggcaagcgtcaccaggaaggattcttcactttcgtcatactggcgcaactctcgttgctgtaccaccagtacaccaagcaactggcgacgttgaataattggtacgcctaaaaacgcgcggaaacgttcttcttttacggaggggatgtatttgaagctggggtgcttttgcgcatctgcaaggtttatcggttccgccagcctgccaaccaggccgacgatcccttcatcaaacgcgagcgttacagtgcgaccgcgtggttttttcagcccccgggtcgccatcaggtagtaacaacgtcgatcatgatcggccaggtagacgctacagacctcggtatccatcgcaagacagatgtcggtaaccagaatatttaacgcctcattcaggcgtggtgcgctggctaccttttcgactatttcgcgcaggcgagtgagcataattggcgtgacttaacctcttttacgtcgataagcagatgcgttttgtggttttggcgtattttcctgcagactcatcaccacactcgcgaactctttcattaccctacggtagacatcacgtttaaaactcaccacctgtctgaccggataccagtaacttacccatcgccagccgtcaaactctggtgtactgctggtttgcatattgatttctgcatcgccgctcaccagctgcaagagaaaccatttttgtttttggccgatacaaaccggcttcgtgtcccaacgcaccaaacgtttcggtaatttgtagcgcaaccagttacgcgtactagcaaggattcgaacgtctttgcggcttaatcctacttcttcaaacaattcacggtacatcgcctgctctgcggattctccggggttgattccgccttgcggaaattgccaggagtgctgaccaaatcgccgggcccacattacctgcccctggcgattacaaatcacgatacctacgtttgggcggtagccatcgtcatcaatcaccggactacctcaaaataaagctttatatacgaatgattgtttcatactccaggaagacggtaaaccactctctgcagggcattacacactaataacaattgaataactcacagttatgtgcagagttataaacagaggaaggggtggatagccgtttttattcaccttttctgtggatagagttgtgaagaactacggaattactacgggaaaacccggagcattctgaataagcccgatatagacattttaaaatattcattatcagtcaatgcattacatgtaattttagtaatgaaaaagagtaattcgtgacccaggtcacacctctcatttacgggttggcgaaagatcaaccaatgccgtatttatccacagaatgtgccactaagttaagcactgaaccactaaaaactggagtttcgtcgcacgtcaaggctgtaaatggaaacagtagtggaggtttttcacagttatcccagctttctgtggataacatggtgtaagatcctgtttattttcagtgaccagatttggaaaacccgttgcagtgttgcgcaactcgattaccggcaacctaaaaagcaatataaatcagagaattgaacaacgcatgtggaaaaagttacactgcgaatattcggcacataattgctgtttgttttttaatcaaggtatcatgacatgtcccaacctcgcccactgctctctcctcccgaaactgaagaacagttgttagcgcaagcacagcaactttctggttatacattgggagaactggcggcacttgtcgggctggttacgccagagaatttaaaacgcgataaaggctggattggcgtgttactggagatctggctaggtgccagcgcagggagtaaacctgagcaagattttgctgctctgggcgtggaacttaaaactatccctgtggatagtcttggtcgtccgctggaaacaacattcgtttgtgttgccccgttaacgggcaatagcggggtgacctgggaaaccagccacgtgcgccacaaactcaaacgcgtactgtggataccggttgaaggcgagcgcagcatcccgctggcgcagcgtcgcgttggaagtccgttgctgtggagcccgaatgaagaggaagaccggcagctacgcgaagactgggaagaattaatggatatgattgttctcggtcaggttgagcggattaccgctcgtcacggggagtatttacagatacgaccgaaagcagcgaatgcgaaagcgcttaccgaagccattggtgcccggggcgaacggattctgacgctgccacgcggcttttatttgaagaagaatttcaccagtgcactactggcccgtcattttctgatccagtaaccatcgctttgacctgccgctttccgggcatataattaccgcttcatttttttggcagggctttttagatgttatttgcatggataaccgatcctaacgcctggcttgcgctcggtacgctgacgctgctggagatcgttcttgggatcgacaatattattttcctttctctggtggtggcaaagcttcccacagcacaacgtgctcatgcgcgccgtctggggttggcgggagccatggttatgcgtctggcgctgctggcaagtatcgcctgggttacgcgcctgacaaatccgctttttacaatattcagtcaggaaatttctgcccgtgatttgattctgcttctgggtggcttgttccttatctggaaagccagcaaggaaatccacgaatccattgaaggtgaagaagaagggctgaaaacacgcgttagtagtttcctcggcgctatcgtgcagattatgctgctggatattatctttagcctcgacagcgtgattacggctgtgggtctgagtgatcacctgtttattatgatggcagccgtggtgattgccgtaggcgtgatgatgttcgccgcgcgcagcattggtgattttgtcgaacgccatcctagcgtaaaaatgctggcgctctctttcctgattctggtgggctttaccctgattctggaaagtttcgacatccacgtaccgaaaggttacatctacttcgcgatgttcttctctattgcggttgaaagcctcaacttgattcgcaacaaaaagaatccgctctgatactccgtacgctctcctgcgggagggcgtactcactccttttaccctcacagtttaagattttcctgctttcaagatatataacgtcggtttataaacagactattatcataggtaggccaaatgaggataaccggatgaaaaaatgggcagtaataatttctgcagtcggactggcgtttgctgtttccgggtgttccagtgattacgtcatggcgaccaaagatggccgtatgattttgaccgatggaaaacctgaaattgatgatgataccgggctggtgagttatcacgatcagcaaggtaacgcgatgcaaattaaccgtgatgatgttagccaaattattgaacgttaacaaataaggtcagcatccggctggccttaagatttttctctttcccttttcccttccctctgccatttttatattccttatgtcgtgattataaaaaggaaacggctatgcaatatcaccgtataccccacagtagcctggaagtcagcacgctggggcttggcacgatgacgtttggtgaacagaacagcgaagccgacgcccacgcacaactcgactatgccgtcgctcagggcattaaccttatcgacgttgccgaaatgtacccagtacctccgcgccccgaaacgcaagggttaaccgaaacctacgtcggcaactggctggcgaaacatggcagccgcgaaaagttaattatcgcctccaaagtgagcggaccgagccgcaataatgacaagggcatccgcccggatcaggcgctggatcggaagaatatccgcgaagcgctgcatgacagcctcaagcgcctacagactgattacctcgatctttatcaggtgcactggccgcagcgcccgaccaactgcttcggcaaactcggttatagctggacggattctgcgcctgcggttagcctgctggatacgctggacgcactggcagagtaccaacgcgcgggaaaaattcgttatatcggcgtgagcaacgaaactgcatttggcgtaatgcgctacctgcatctggcggacaaacacgatctgccgcgtattgtcaccattcagaacccttacagtctgttaaaccgcagttttgaagtaggtctggcagaagtcagccagtatgaaggggtcgaactgctggcctatagctgcctgggtttcggcacgctgaccgggaaatatctcaatggtgcaaaacccgctggcgcacgtaatacgctctttagtcggttcacccgctatagcggtgagcaaacgcaaaaagccgtcgcggcgtatgttgatatcgccagacgtcatggcctggaccctgctcagatggcgctcgcgtttgtacgccgtcaaccgtttgttgccagcactctgctgggcgcaaccacgatggatcagctgaaaactaacatcgaaagtttgcatctggagttaagcgaagacgtattagctgaaattgaagcggtgcatcaggtttatacttatccggcaccataagattaacgccggttaaaaccggcgttaaatattaatgacggcgctgccagatccacagcgccgttattgccagcgcaaacagcgcaccgaagccaatgccaatgggcacgaccgggatgcctatcattaccgccaggctgtaaatgcccagcatcaacaacatggcgctgttttcgccaaggttttgtactgcaatcgcattccccgccccgacgctttttttaccccgctcctgtagcaacgcattgagcggaacgacaaaaaagccccccatcacgccaatcagcatcaacaaggcataggctggcagcagctcgtgttgcagggaaaaaatcagtaccaccacgccaatcaaaatcccggctggcatacagcgactcacggtttccagcgtaactaacttcgctgccgcacctgcgccaaccacgataccaatcgctaccatcgcgttgagataggtgggcgtagcgttatcggtaatgcccagcgccaccggtacccacagcaccaacaggaaacgcagcgtgacacccgctccccagaataaactggtgcccaccaggctaaaacgcgtttcaccattgcgccataggctggtgcaggcattcaggaaactgcgggtcatgttgatgagattccaggactgccccggacgcgccgccgccagtttgggaatgtagatattggcaacgaccgcaccaccgtaggccagtgcgcatgcggccagggcgacgaggacatgccagtcagccagcacaccaccggctacggaaccgagcaaaatcgccgctatggtagaagcttccattaaaccgttagctttcactaacttactacccgtggttaattcgccgagaataccgtatttcgccggactataggctgcagcaccaacacccaccagcgtatagccgagaaacggattgataccaaagcagatactggctgcgcccagcagcttcaggccgttggcaaacatcatcacccggcctttggcgaagctatccgccacctgcccgacaaacggcgcaaaaagaatgtaagcacctacaaacaccatttgcaggatgggctggctccactccggatagaactgcgctttcagtaacgccagagtggcaaacagtagggcattatcgccaaacgcagagagaaactgcgccacgataaccgctttcatccccttgctccacaagctagtgttagtgtgcacactctcactcatcgtgttgttccgcttcgtctacccagcttttcaacgtgacaaagtcaggtttgccgctgccaagtaatggcatctgtttcagatagcgaatatcgcgcggtacagcaagctccggcacgccgtgctcgcgggcatactgttgcaacttatcgcgcgtcagttcgttatctgtggtgaaaagcaccagtgcctcgcctttgctggcatcgctcttaatcgcagtggcatggactttatctgggctaacaccaagtgccagttgttccaccatttccaggctcaccatttcgcctgcaattttggcaaagcgttttgcgcggccctgaatctgcacaaagccctgctcgtcaaaacgcacaatatcgccagtgtcataccagccgcgctccatttcgccgcgaacattctcggcggtgggcacttccagtacacctggcttctccacccgcagatagccgttcattatgttcggccctttcagttgcaggcgtccgccctcttcgataccagggacgctcaacaggcgcgcatccattcctggtagaatacgccctaccgtaccgggtttcgccgccatcggtacgttgatagaaacgacaggcgcgcattcggtcacgccgtagccttcaaggatgcgcaggccaaatttatcctgccaaagctgtttggtactttcttgtaatttttctgcgcctgccaccacatagcgtagacgatagaagtcatacgggttggcgaaacgcgcgtagtgaccgaggaaagtgctggtgccgaacaacacggtgcaactgcggtcatacaccaactccggcacaatgcggtaatgcagcgggcttggataaaggaacacttctgcacctgtaagcagtggcgtaaacaggcctaccgtcagcccaaaggagtgaaacagcggtaacgcgctcataaagcgatcgttggtggtgaagtcggcaatcgttttaatctgctcgacattcgccagaatgcttttatggctatggacgacgcctttcggatggccttcagaaccggaggtaaaaaggatcagcgcctcttcttccggctgctgtttaacctgtgccagacgcggcatcagcaaatgagcgaagatccatactttgtcggcagtggtgacatctgcttttaaatcttccagatagacccagcgcacctgagtaagttgctccggcagatgccagagtttgcctttatcgagaaactggcgggaagtgaagatggttttgatttcagccgccgtaatagcactggtcagcccttttaccccggcagtgtagttcatcattgcgggcatgcggcgacgggcgatggccccaaaaatcactgccgcactgatgcctgcattgggcagcattaagccgatgcgttcgccttcaacactgtatttttcaaggatgcgtccaacaaacagcgttttcgtaagcaatttgcgataggagtctggggtaaagttgacgtcttcgacacatttcttcccggctccgaagcggtacattgcactcagtaaagattcgtacagcgtttcacgcgggcgcaccgccattcgcgcttccatcattatttgatgcagcatttcgccagcgattttgcgacggtcacgggcacgcggcgcatccggcatcgccacctgcgttggtggcaaaatatgcagagtaatttgcgggaacaagcgacgtttaaccagacctttcaggcggctgaagtgcgtaagttccgccccttcaatacgcacaggaataaccgttgcaccagacttcgccgcgacaaaacccgcgccatcgtagattttcatcaggctgcctgtcgtggtgatgcgtccttcagggaaaatcaccactggtcggccctgttccaccagacgtaccagatgtttaatagccataggttgcgtcgggtcgagaggaacaaagtcgataaaacttttcagccaacgcatataccactgttggcttatactggtgtaaacggcaaacactggacgcacaggtaaaaacagtccaagcaaaatgccatcaataaaagagacgtgattaggcgtaattagaacgcgctcgcccttcagtgcctgggtgtcacccgtaacgcgaacgcgatacaaaacacggcacaaatttcgaaaaaagctaaaaagcattccaactccctttgctctgattcagtaaaagcgaatggagggagattacacgagataaagaacgcgagcgacagtaaattaggtgcgaaaaaaaacctgcgcatccgcgcaggttggtgcaagagacagggtacgaagagcgtaccgaataatctcaccaatcaatacctctgggatcttgattgtggtctgcacgacgactcttcgccagcgagaaaacgcaaaggaatgaagggaaatgcaacgaggtgtgtaaattgtcggttactgttacagattgatgaccggcaaaaaaaacctgcgcatctgcgcaggctggtgtaattcatgtgctcaacccgaagttgacttcacctatcaatacctctgggatcaccactttagcaacctgaagccaaacgccaccagcggtcaatcgcaacagcgtttcgcaaagtgtaaccaaaggtttgcaatctctttttttgtcttacttatttgcgtttggctcacattcccacgatgaaaacacgccaccccttgaaccaacgggcgttttccgtaacactgaaagaatgtaagcgtttacccactaaggtattttcatggcgaccataaaggatgtagcccgactggcaggcgttagtgtcgccaccgtttcccgcgtcattaataatagtcccaaagccagcgaagcttcccggctggctgtgcatagtgcaatggagtctcttagctatcacccgaacgccaacgcccgtgcgctggcgcagcagaccactgaaacggtcggtctggtcgttggtgatgtttccgatccgtttttcggtgcaatggtgaaagcggtcgaacaggtggcttatcacaccggtaattttttattgattggcaacggttaccacaacgaacaaaaagagcgtcaggccattgagcaactgatccgccatcgctgtgctgcgttggtcgtccatgccaaaatgatcccggatgctgatttagccagtttaatgaaacaaatgcccggtatggtgctgatcaaccgtatcctgcctggctttgaaaaccgttgtattgctctggacgatcgttacggtgcctggctggcaacgcgtcatttaattcagcaaggtcatacccgcattggttatctgtgctctaaccactctatttctgacgccgaagatcgtctgcaagggtattacgatgcccttgctgaaagtggtattgcggccaatgaccggctggtgacatttggcgaaccagacgaaagcggcggcgaacaggcaatgaccgagcttttgggacgaggaagaaatttcactgcggtagcctgttataacgatagtatggcggcgggtgcgatgggcgttctcaatgataatggtattgatgtaccgggtgagattagcttaattggctttgatgatgtgctggtgagtcgctatgtgcgtccgcgcctgaccaccgtgcgttacccaatcgtgacgatggcgacccaggctgccgaactggctttggcgctggcggataatcgccctctcccggaaatcactaatgtctttagtccgacgctggtacgtcgtcatagtgtgagtactccgagcctggaggcaagtcatcatgcaaccagcgactaaccgcagttaaagcaattccagcgccagtaattcttcgatggtctggcgacggcgaatcaaccgcgcctgaccattatcaaacagaacttctggtaacagcggacggctattgtagttggaactcatacttgcgccatatgcccctgtatcatgcagtaccagataatcacctgccttcacttccggcaaggcgcgggtttcaacatttcccccttcctgctgggtaaagacatcgccgctttcacataacggtccggcgacgacggtttccaccgttggcgcgtgttccagagaacgaccatcagctgccagggcactgatatggtggtaactaccgtacattgccgggcgcatcagatcgttgaacccggcatcaaccagcacaaagtggcggctccccatttgtttgacgctccgcacctgagtaattaatacgccagactgcgctaccaggaagcgacccggttcaatttccagtttcacagggtggcccaaatggcgggcgatttgctcacgcgcggcattccacagaccataataatgttcggtatcaaccgcctcttcaccctgttgataaggaacagaaagcccaccgcccgcagaaatagcctgtaaatcctgaccgaattcgatgacctgacgcaccatagcaccacacacctgttccagatgggcataatcaacgccagaaccaatgtgcatgtgaatgccgaccagctgcagatgatgacgttgtatcacgtccagtgcggcgggcagatcggtgtaccagataccgtgcttgctgttttcgccaccggtattggttttttggctatgtccgtgaccaaaccccggattaacgcgcagccatacccgatgccctgggctaacctggcccagttggtcgagcatatcaacagaacccgcattcaccggaatttgcaattcactgacgcgttcaagcgtcgcctgatcgataacatctgccgtaaaaacaatatcatcggggtgcgtttgcggattgtaacccgccgccaacgcacgctctatttcgcctaagctgacggaatccactttcacgccctgctcacgcattaagcgcaaaatatgaatattggaacaggctttctgtgcaaagcgcaccacatcaaactgtttcagcgctgcaatctgccgacgaataatttgcgcatcgtagacccacaccgggcagccaaattcagcgggcaaacgcagcagattttcggcggtgagatcggtatcggtgctgaacagactatgtggcataacaaactccagataagtgcttttttatgattacgccacatcataaaaagaataaaaaatatcgatttatgtcgagtctatgcaaaaatgatatggattaccggattgcgagagagcgctaatggccgccgttaacttacgtcatattgaaatttttcatgcggtaatgaccgccggaagcctgactgaggcggcacacctgctacacaccagtcagccaaccgtcagccgcgaacttgcgcgctttgagaaggtgatcgggctgaaattgtttgagcgcgtacgtgggcgattacatcctaccgtgcaaggactgcgtctgtttgaagaagtgcaacgatcctggtacggactggatcgcattgtcagcgccgcagaaagtctgcgcgagtttcgccagggagaactgtctattgcctgcctgccggtctttagccaatcttttttaccgcagctcctgcaaccctttctggcacgttatcccgatgtcagcttaaatatcgtgccccaggaaagtccgctacttgaagagtggctcagcgcccagcgtcatgatttaggactcactgaaacgctccatacgcctgcgggaacagaacgtaccgaattactctctttagatgaagtgtgtgtgttacctccgggtcatccgctggcggtaaaaaaggtattaacgccggatgattttcagggtgagaactacatcagcctttcccgtactgacagctatcgccagttgctggatcagctatttactgaacatcaggttaaacgacgcatgatcgtagaaacccacagcgccgcgagtgtctgcgcaatggtacgggcgggggtaggtattagcgtggttaacccgctcaccgcactagattatgcggcaagcggtttagtggtgcggcggttcagtattgcggttccgttcaccgtcagcctgatccgccccctgcaccgcccgagtagtgcgctggttcaggcgtttagtgggcatttacaagcggggttaccgaaactggtcacttctcttgacgctattttgagcagtgctacgacagcataattagctcagcataaaagcgacagcatcctcggcatggatcgccgcggtatcaaacacaggcaaaacactgcgctcttctggcaccagtaaaccaatttctgtgcagccaaaaatgacgccctgtgcgccctgttctgcaaggcgagcaatcacttgcgcacaataagcgcgactcgcttcggtaaattgccccagacacagttcttcaaaaataatctgattaattttcgcccgttcatccgcttcaggaataagacaattgatggaaaattgttccgtcagccgcccgcgataaaaatcctgttccatggtgtaacgcgtacccagcagcgccacacgagtcattccggccccggtaattgcacgtccggtggcatccgcaatgtgtaagaaaggcagagtgcaacgactctcaatggcatccgccactttatgcatcgtattggtacatagcacaataccttctgcgcccgcccgctgtaagccaagcgccgcctcagccagaatgtccccggttttatcccattccccgcgacgctggcactcttctatttcatgaaaatcgacgctatgtagcagcacttgcgcagagtgaagcccaccaagccgctgtttaatgccttcatttatcaaacgatagtaaggaatggtggattcccagctcattcctcccagcaaaccaattgttttcattcctctctcctgatgtgtgttaccgcaacaaggctgaataaggaacgagacaaacgcctcaacggccaagtgcccaatctctattaacgaaaaaagggccggatgtacagcacatccggcccgtgaaatcagacgccgatatttctcaacttctcgcctgccatcagtttgcgttcgatatgttccagcgtgacatttttggtttccggaatgagccagaaagtaatgcccacaaacgcaatgttcagcgcagtgtagagccagaacgtaccggcagcgccaatgctatcaagcagtgtcaggaaggtcgcgccgataatcatattgctcacccagttcgtggtggtgctacaggtaataccgaaatcgcggcatttcagcggctgaatttcagagcacaggatccacaccactggcgcggcgctcatcgcataaccggcaatacacatcatcgtcatgccaacagagagccaggacaagccactggaagccgtaccgttatcaaactgcatcaggcaatagcccagcaccagagtgcctaacgccatcacgctgaaaccaattttcagagccggtttacgccctgctttatctaccgtaaacaccgcaataaaggtggcgaacataaaggtcagccctacgaccagagtcgcaatcatctgttgttctgtggtcgtaaagcccgccattttgaagatacgcggcgcgtagtacatgatgatgttcataccggtaaactgctgcatcgcctgcaacaacataccgagaaacacagcacgacggacgttacggttgatcttaaacagtgcccaaccgccctgttttaacttcaggctttcacgaatttcgttgagttcttctcgcgctttttcgctcgtatcgcgcagcatacgcaatacttcttccgcctcaatatgacgccccttttccgccagccagcgcgggctatttggcaggaagactaccagaataatcagcagaactgctggtaaagcaagaacccccaacattgcgcgccagttaccgctataactgaacgctgtatcggataaaaacgccagcacgatgccgagtgtgaccatcaactggtacatactgatcatcttaccgcgaacgttttcacttgccatttcagaaagatacagaggagcggtgtaagacgcgatcccgacagcaatgcccagcaccacacgagcggcgattaacatctctacgctggtcgcaaaagcggaccctatagaaccgagtacaaacaggatggcccccgccatcaggctgtatttacgccccaggcggaagctcagccaaccattaaacagcgcaccaattgctgcaccgagcatcatgctactaaccacccattcctgcaaacgactggtcagcacaaagtgatcggtaatgaacggcaacgctccggcgattacgccgatatcaagaccaaataacaatcctgcgaccgcagcagctacgctaacaaacatattcatacgccgcgtatcccgcaaagaacgtggcgttaaagcagattccgtattgatagtaaccattttttcctgccagcagagagtaagacatagtgaaaaaatacgtgaacaactcacgcaggtgtcaggtcggaaacagcataaatatggattaaattgctgcgacatgtcgttatgtgatggatattccaattttcaaattaagttgaattattgagattattattaaccacctaattttacagcagataaaattcataaagttcattaattgataattaatatggattatttcataaccatgatatggattatgatgatctacaggtataaaaaaccctgccatgcggcagggtcataaaagtaagaagaatgaattaacgcgccagccaaccgccatccacggcaatggtataaccattcacataatcactagcgctggaggcaaggaacactatcggccccatcaggtcactcggcagtccccaacgaccagctggaatgcggtcgagaatttccgcgctacgttgttcatctgcccgtagttgttgagtattgttggtcgccatgtaacccggggctatcgcattaacattaatgttgtgtttagcccattcgttcgccatcaatcgcgtcacacccatcacgccgcttttacttgcggtataagaaggcacacggatcccgccctggaaggagagcatactcgcgatattgataatcttgccgccattgccttgcgcgataaagtgtttcgccgctgcctgagacatgaagaatacgctcttgatattcaggttcatgacatcgtcccagtccttttcgctgaactcgagagcatcttcgcggcgaatcaatccggcgttattcaccaggatatcaatatgaccaaactccgctaccgcgcgatccagcagtgctggaataccatcaatctttcgcagatcggcggtcaggcttaaaaaacgacgccccagcgctgtgacctgctcgatggtttcagtcggttcaacgatgttaatgccaacaatgtcacagcccgcttgcgccagccccaacgccatcccctgacccagtccagtatcacaaccagtgacgaccgcaactttaccttcgagagaaaatgcacttaaaatcataacaataccttattcgtttatgcccacaattagcgcaaatctttaacggccacatggtccatatcatcaaagacctggttttcaccgaccatgccccagataaaggtataagctttggttccgacaccggaatggatgctccagctcggggagatcaccgcctgctcgttatgcatcacaatatgacgcgtttcttgcggctgccccatcatgtggaaaacgcaggcgtcatcatccatattgaaatagaaataaacttccatccggcgctcgtgggtgtgacacggcatggtgttccacaagttacccggagccagctccgtcagccccatactcaattggcaggtttccagtacatccgggacaaaatatttgttaatcgtgcgacggttactggtgaggttatcgcctaacgtgactggagatacttcgtccggtgtgacttttttggtgggatacgtcgtatgcgcgggtgcgcaattgtaataaaacttcgccggagtgccggtatcaatactggcaaagacaacttcttttgcacctttaccaacatacagggcgtcgcggtgaccgatttcatagcattggccatcgacagtaatcgtaccggcaccgccaatattgataacacctaactcgcgacgttcaaggaaatagcttacgccgagttgtttaccaacttccccgccaacggaaaccgttttagttatcggcataatgccgccaacaataattcggtcaatgtggctgtaaaccatggtgtactcatcggcgacaaataccttttcaaccaaaaattcattgcgcagcccttgggtatccagcgtttttgcgtgcgcactgtggatgctctgtcttacgtccacatcaacctccgataatcagtgaagcgtgaaaatagaaaacgatagtgaaacactgtttcgttttctctataaagggatgatatgcccatgggctagggttttcaattaaaaataaaacaatgtttcatttttaagttaaggattaaaaaaagtgcagtgtcgatcacgaatatgtcatgagaatggaaaaatgagggagcccagaaaatgtatgtcgacttgccagccatcattattcaacagattaatgacggcagatatttatcggtaaggaggaaatgcagagttattcgtcacgttcaatggtcaatgccacaccctggcccccgccgatacaaagcgttgccagtcctttgcgggcattacgtttcaccatttcatgaaccagagaaaccaggattcggcaaccggaagcgcctatcgggtgaccgagtgcgatcgcgccaccattgacattgacccgacgctcatcccactcaagcatcttgccaacgctaagcgcctgtgcagcaaacgcttcattagcctcgataagatcgacttcagccaactgccagcctacacgctccaggcaacggcgggtcgcatacaccggcgcaattcccatcaatgccggatctacaccaacgctggcaaatgcgcgaatgcgggccagcacgggtaaattcaacgctcgtgctttggcttcgctcatcatcattaccgcagctgcgccatcgtttatggaacttgcattacccgctgtcacagaaccgagactatcaaaactaggatttaaacgggctaagccttctgcgctggcgtcagtgcgtggctgttcatcggtatcaacaaccaacgtctgcccgttactttgggtcattaccgggacgatctcatctttaaatcgtccggcgtcaatcgccgctcgcgctttttgttggctgctaagtgcgtaagcatcctgcaactgacggctgatgccatattcgcgagccagattttcggcggtgacaccaatatgataatcattgaaggcatcccacaacccatcatgcacaagactgtcaaccaactggctattgccaagctgtgcaccggtgcggctatcagtcagaacatgtggtgcgcggctcatgttttcctggccaccggcgatgacaatatcagcctcgccacactgtatcgcctgagtagccagatgcagtgctttaagcccggaaccgcaaacgtcattaatagtgattgcagaaacgctattaggcagaccacctttaatagcgctttgccttgccggattctgccctgcccctgcagtcaacacctgaccaagaattacttcatccaccgcatatgcaggaacgccggtacgttctattaacgctttcacgaccagactaccaagttccacggcggaatgacccgctaacgcaccacgaaagcagccgataggtgtccgtaacgccccgacaatcacaacgtctttcatcacaacctcgcaccaattaacagtgcaatagtaaatgattgttaattacagttatcttaattgtttaaaaaaagtgatttttatcacaaaggaaatatgcctgagcagcagtcagagacataactggcacgtaaggtttgcaaccactaacccaccaatagaggggtagatagggcgttaatctcccatacttaacctggtttatggtaaattgccctccattttgtttaatttgtagatgatacgttcagataatgtctaatatttggtctaaagaagaaactctgtggagtttcgcgctctacggcacagccgttggtgcaggcacgctcttccttcctattcagttaggtagcgcaggggctgtggtcctgtttattactgctctggtcgcctggcctttaacatattggccacataaagccttgtgccagttcatcctcagtagtaaaacaagtgcaggtgaagggataacgggcgcggtaacacactactatggcaagaagattggtaatctgattaccacgctgtacttcatcgccttttttgtcgtcgtgttgatatatgcagtggcaattaccaacagtcttacggaacagctggcaaagcatatggttattgatcttcgcatccgtatgttggtgagtctgggtgttgtattaattctgaatctcatttttctgatgggacgtcatgccactattcgggtaatgggatttttggtattcccattgattgcctatttcttatttctttccatttaccttgtcggtagttggcaacctgatctattaacaacccaggtagagttcaatcagaatacccttcaccagatatggataagcattcccgtgatggttttcgcctttagccatacgcccattatttctacgtttgccatagacagacgtgaaaaatatggcgaacacgctatggataaatgcaaaaaaattatgaaagtcgcttatctcatcatctgcataagtgtactgttctttgtctttagctgcctgctttctattccacctagctatattgaagctgctaaagaagaaggggtcaccattttaagcgcgctttctatgctgccgaacgccccagcatggttgagtatttccgggattattgtcgcagtagttgcgatgagcaaaagtttcctgggtacgtactttggcgttattgaaggtgccacagaggtcgtcaaaacaacactacagcaggttggtgtaaagaaaagtcgtgcatttaaccgcgcactaagtattatgttggtaagcctgattaccttcattgtttgttgcattaacccgaacgcgattagcatgatttacgcgatcagcggcccgctcattgccatgatacttttcatcatgcctacgctgagtacgtatctcatcccggcgcttaaaccctggcgttccatcggaaatctgattacgctgatcgtgggtatcctgtgcgtaagcgtaatgttctttagctaatatcagttgtggatggttcaaaattgctacaattttgaaccattccatttttcataatattcatttgttattattccaccctatcacttctctcgtcatatcctagtattatcagttagttaaacacacaaagagatctgaacatcttaaataagactatttaagatgcataacttagattcgcaagatatcttctggtcattcaaaaacaatttgcgatatagatattcttataccatgagatagttatctggaccgctctcaaccatgcaagattaaatcagtgaaacataatcatatttgataacgagaaatgcatttttaaatgccttactcagaattatagcaaatacagattaatcgcaatttttcccggcaaaattacaaaatcatggtgtattgacatcatcaataaccaatgaaattatgcaattatatacggatagggaggttcttaacatggggctttgtagtcgttataaaagtcttacatgcaatagttgcagtatgcattgccaaataatgccagaagagagtccgcgtttgcagtattgcgcaaacagctgtttttgtatgtggcccgaagaaagtagttattttaatcgtggtgtggtagaaggtatcttaacaaaaaaccacaatgcgagattaagcggatatatttttgtcgattttagtgtaagttttttacgtctattccttgaaaaagactggattgactatcttgcaagtactgacatggggattgttttagtcagcgaccgcaatatgcaaagcttagctaattactggcgaaaacacaacagtgcaatatctgctgtcatatataatgatgatggtcttgatgttgccaatgaaaagatcagacaactatttattggtcgttatttaagttttaccggaggtaacacattaactcagatggaattcaccataatggggtatatggtttctggttataatccatatcagattgctgaagttctggatatggatatccgtagcatctacgcgtacaagcaacgaatcgaaaagagaatgggtggtaaaataaacgaattatttattcgtagtcatagcgtccaacattgatactcaacgaccagccagaatcatactctgtttatacgggcatttattgaaatgtccgtattttataaataggccgtcccctcaagagtaaacaccatagtatttaaaaccatcacacgaaaaattcagaagcattacgaaatatgaatttacaaacaatagtggcataaatgttaaccatgttaatttacgtaaagttttacgttgcaacattaaagcctcatttcaatcatcatgataaatataaaattaatatatatttatgccgtaaataccaatatacttagcaaactatgtgatctccatttcgattgatttagtgtttattgacgtatgtactggattattaacgataatatcgagttctggcctgagcaccgaaaattaataagcgtacataacgccgatcttaacgtcgttctgacaacgccagccagtcgatgtttaagtcttctacttgaagcttttcctgatgtggttgcacaacaagattttttcaccagagtctgggaagaagaaggtatgcgtgtgcctactaacacgttatatcagaacatatccattatcagacgcggatttcgcgctgttggtgatactacccacagcctaattgcaaccgtgccgagaagaggattcaagatccataatgacattaacatacaaaatcatgtaataaacagcagtacagacgcacatacacacaatgccccacctgccataaaagttaatgcgggatacaaagagagcattggtggcgcaaagaatttcaataacaaaatcctcaaacatataaaaagtcatctaattatgttgagcgcatttgtcataggcgcatattctgcatattggctatggaataataatcaaccgaagccatttttcaaggattacaagactgttgcggaaattaatggctgccattttaatgtaacagaagatacaattgatgggttgaaagagttcgataaatataaaacacggatactggatagcgggattaactgtaaaaaacatccgtggttatacttccctcttgcaaaatccagtccggggatgattgttatggcatgcaataaaaactataaccaacatgaagtggcaaactgtttaaccctgtcttaccgtgaggttaatcgtgattgattataaaaaaaacttattatttattttagtttttatcagtgggtttattctcttcactgtctattcttacactgcagaaaaaatgatatataacgaaacatgcactgcaaattgggtaatttttaatgaccagggacgagcaaatcttaccatcgactttatgtataacaaaaaaaataaaacaggaactgttgcgttgagtggaacctggcaacaaggtaacagagaaagtaaaagtatacggcgaaatattgaatacacatggattgaaaactatgacacagcccatttaacaagtaagaaagttaataagtttgagattatggatcaagttgatgatgatagacttgcacaacttattcctgatttttatgtctttccagaaaaaagtgtaagctataatatactaaagcaaggtaagcatgcttttattttgagcattggtaacagagcaataatgcattgtgcaaggtaaactaaaatagataacaaaaagatggaacctcgttaatcataaaacaataaaattaaatattctcgcagtatatggcagtctaaagcatcaaagatttgatcaacatctttcattttagacatctccttgcaatgtaaaatatcatgtatcaacaacatctggtgcaaatccaactgtcgaactcgacattcatcttagctcgattattattccttcgtacagtgcttgtaaacaatacagaaagaggattattaagaaccagtttactcagactatcaatagaggaaaggactaacgtttctttaaaagaattgatttcatcatctgttaaactaaactcatcattgacagatcgactgatataactgtttttaactttactctttacgttgactttattgacagaattaacattcacatatctactatttaatgtccaacttgttgtttgcgtgagaacattctcagcattaaggaatttttttaacggaatccttggtttctttttgctgtcgctatttacaatatcatgcatatagaccatttcatgaatctggctaaattcaatgtccattgtatacctcacatttttaccgtgactcgatgttactgttcaataatcaccttccatcaatactaaaattaatacccctaatgtgccgataacaaatatagtcattctacgtaacgtctccataaggtgatatttgacattatcagaagctgcgaattcggattttgctctaatcaaatgagagaaatgtaaaatgaagccacgaaatattaataatagcctaccactgcaaccattagttcctgatcaggagaacaaaaataagaaaaatgaagagaaatccgttaatccagttaaaatcacaatggggtctggtttaaattatattgaacaagaatctcttggaggaaaatatctaacacatgatttgagtataaagatagcggatatttctgaagagataattcagcaagcaatattatctgctatgagcatatataaatttagcataacagatgatttaatgagtatggctgtaaatgaactcataaaactgaccaaaatagagaataatgtagacctgaataaattcactactatatgcacagacgttctatccccccgcgtcaccagacataataaagaaaaaaacaaacgacattctacccttctcaaaaatcccctttttaattttcattgaaaaaatggcaattgatactatgaatccaggtcatacacattaaggcatttatgtaatgtcgtaattaagataactaataaggtgaatattagtaaaacaactaatgatgttattagtttgtagtgaacagtacttttaccaataatgaaaaatataccataagcaatgcaagcttaaaactcataatttaaaaaagataaatataaaaatatcaatgagtcaatcaataataatttggcatcacgagacacatcacagaggaatattatgagcacagaaacaattgaaatattcaataatagtgatgaatgggcaaatcaactaaaacacgcattaagcaaaggagaaaatctggcattactacatggtttaactcctgatatccttgatagaatatatgcatatgcattcgactaccatgaaaagggtaatataacggacgcagaaatttattataaattcttgtgcatttatgcgttcgaaaatcatgagtatctaaaagattttgcaagtgtatgtcagcccaaaaagaaatatcaacaagcatatgacctttacaaactaagttacaattacttcccgtatgatgactatagtgttatttatcgtatgggtcaatgtcagattggggctaaaaatatcgataacgcaatgcaatgtttctatcacattattaacaattgtgaggatgatagtgttaagagtaaagcgcaggcatatattgaactcttaaacgataatagtgaagataatggctaagcattacaatcatttggttaaatttgctggttatagtgcagttaaccactataaccagcacctcttatgttttcttaaatcagcatcttaaaacagttaagagcatactataaatcattatttttcaatgcgttagagaacaatctactttatcaaaattgaataaggctatttcagattacatcactgaattcctaagataaattagtgaacacaaccatagatatgtcaaatgtaatttcctgtagcgttaatgacacataaatatgaatagccataatttctattgcttaagcaggatgcaagaaaccaattttttcatagaggttaactaatggacttagaaaataaattcagttatcattttcttgagggattaacgctcacggaagatggaattcttactcaaggaaatgagcaagtttatattccacagaaagagttaggtgtattaatagtattacttgaatccgctggtcatgttgtactgaaagatatgatcatcgaaagtgtatggaaaaatattattgttagtgacgagtccctgacaagatgtatctattctttgcgctgcatttttgaaaaaattggctatgatcgttgcatagaaacaatctaccggaaaggttatcgtttcagcgggcaggttttcaaaactaaaattaatgaagataatactagtgactattccatagctatattccctttcactactagtttgaatacactggatccattaatacttaatcaggaattagtgcaaatcattagtaataaaaaaatcgatggtctctatacctatccgatggctgcgacaaatttttgtaatgatcacatatctcaaaatagtttcttgagcagattcaagccagattatttcgttacaggaagaataaaccagaataatgcagtgaacactttatacattgagttgatcgacgctaaaaaccttttcctcatcgccagtaatcatctccctgttgatgaactacataatacaagtcaatttattatagataatatccttcaaacggtacataaaccagaacgatctgtaagattagctaagcaggaccaaggatataagaatcattatttaagtgatgaaatgttagccggaaagaaagaactttacgacttcacccctgaaagcatttacagggccatgactatatttgatagattacaaaataaaagtgatatacagacgctaaaaacagaatgttattgccttctagcggaatgccatatgtctttggcacttcatggaaaaagtgaacttgaacttgctgctcaaaaagcattagagcttttagattatgtaagtgacataaccactgtcgatggaaaaattttagctattatgggactgataactggtctgtctggacaagcaaaagtatctcatatcttatttgaacaggctaagatacacagtactgatatagcctctctctactactatagggcactagtccactttcataatgaaaaaattgaagaggcaaggatttgtatagacaaaagtctacaactcgaacccagaagacgaaaagcagttgtgataaaagaatgtgtagatatgtatgtgcctaacccgctcaaaaacaacattaaactctactataaagaaactgagagtgaaagccatcgagttataattgacaacattttgaaattaaagcagctgacgagaatttgtatgcgataaatttttattgacgcaattttattatttagatgtatgcaacttgttatttaaacaacagagataaaaatatctaagatattcaccttattgcaagatatttaaaatgctctagagttaaaagtatgatgtaaagaccattggcctggacaattaaaaaagggagctttatgactaatccaatcggtatcaataatttatctcaaagtagtaatatagcgaatgcaacgggtgatgaagtcgtaagtttagataaacacatcaacaccagtgctactgatacagatcaaatacaagcatttatagttagtacatggatggcgccttttcaaaatgatatgtatagtgaagataatcctatcagtccttactataaaattgagtggtaaacgattgaccaaataaatcataacgagatacttttataatagtatctcgttcctttcattcaatcctcacacatgaaaaaatatgcgctcaccaaaagttaaattcttaaccatcttcacgttttgtatatttattacaaaaatgtctttcgccagcaactcttgctctaatgaagcaggaacaatgttcagaatcgaaccaaatttaattaaagctatcgctcttgttgaaagcaatctaaaaaaggatagcataggcaagaacagagataagaataacaatataaagagtttagattattggttaatgcagataaaccagatgcatattcccctgttaaaaaaacgtggaataataaaagatgaacgagatttgttagataacccttgtctgaacattaaaataggaaccgagattttatataaccattttagtcgttgtggagtaacgtggcaatgcctggggacttataatgcgggttttgcaatggataaccaaaaaaagagacagcaatatgccccaaaatatatattgtatataccaggcttaatgaactaaacaatcgtaaggcttcagcaaaatgagcctaaagcctcttttttttatatagtgcaaacacccatacgtaaagctgttttgatcaactcgataccactgtgaacatctaatttcttcatgatattgagtctatgagtttcgactgttttcctgcttaactgcaagaaattagcgatttctttgtttgttttaccatcagctatgagttgtaatatttcactctcacgatttgtaagttgattatcagaggaatacctggaagatattttttcacaatccatatgtacactatcaaaataagtgtaaccattactaatgctatcaatagcacgatttagtttcgccgggtgactggttttccatacgcatcctttcgcacctgcttcaagcaattttatactatcaatatacggcatctttgctacaaatgtaataatatgagcatctatcttatggcttttaacccattttacgagttcggcccccatcattccacctgcaaattctcctaaaataaatatttaggctgtagatttgttacactccgctatagctttcttcagatctttatagcccacttatttaacaacttgaaaataaggtgttttacctgggttgttacaaaaggattgcattgcgtaaacgctttttatttacaacaaaatggggaagtattacggcgaagataaattggagcgggcgaagggaatcgaaccctcgtatagagcttgggaagctctcgttctaccattgaactacgcccgcttcgagatgcgtaaggcattataaaccttacgctctccttagcaagtgccacgctgctgactgctgattaattcgccatcagcattttggcttgctgccctgaggcggcaagtaacgtagcggatcaattgccgttgcacggtaacgaatctggaaatgcaggcgaacagatgccgcatccgtgctccccatagtggcgattttttgcccagccttcacgctttgcccattatttaccagcatcgtgtcattatgggcgtaagccgtaatgtaatcttcactgtgtttaatcatgatgagattaccgtagccacgcagctggttgcccacatacaccacctttcctgcacccgcggcgtaaataggtgtaccccgtggagcactgatatcaatccctttattgccgccatctgctgtgctatacggcatgataactttccctgtcgttggccataaccaacaacgttgccctactggcggccaggaacttttcggtaccgcactactcggtgtaacgcttgcggttttggtcgtacttttggcggtacttttacgtgtaatactgctacttttcgccccacccagttttagtttctgaccaacttcaatggtgtaagggggggaaatgccgttcagtcgcgccagttcttttacgctggttcccgtggtgcggctaatacgatatagcgtatccccccgtttcacggtgtaaacggagccggaatacgttcctgtatcggaacttttgctaccgctacagcccgccaaaagcagtccaacgcttaacaacatcacgatacccagagattttttattcaggcgtcccgcactcaaaatctttcctcgcttaaaaaacaagacgccttatcatagcagccagcctcttgatacccaatctcttgcttctggaaaaacgtggtaatagagaaagaggttaatttcatttggcaaagggaagtatcatcagcaaaatattcgctgtagaggtatcgaacttcctgactttttaccctatttcccatcctgatgcgtaataatcccaatttatcacattgattttatcgccactcatattgatacgtatcactgcccctattcagagtcctgtttcgtatcatatctgtgtttttttaacgtcatcacacttcctacctcccctaacgcttatcgtcgtttctggcgtaaatcttgcctgcttagactaaatctttgccataagaaccaaatgttcaaatcgaggggatttctatggaagcgcgggaagcaaccgctacgggtgaatcatgcatgcgcgtcgatgccattgctaaggtcaccgggcgggcacgatatactgacgattatgttatggcgggcatgtgttatgcgaaatatgtacgtagccctatcgcacatggttatgccgtaagtattaatgatgaacaagccagaagtttgccgggcgtactggcgatttttacctgggaagatgtgcctgatattccattcgctacagctgggcatgcctggacacttgacgaaaacaagcgcgataccgccgatcgcgcactgctaactcgccatgttcgtcatcatggtgacgccgttgccatcgtcgtggcccgcgatgaactcacggcagaaaaagcggcgcaattggtcagcattgagtggcaagaattacccgttatcaccacgccagaagcggcgctggcagaagacgctgcaccaatccataacggtggcaatttactgaaacaaagcacgatgagcacgggtaatgtccaacaaacaatcgatgccgccgactaccaggtacaggggcactatcagacccccgttattcaacattgtcacatggaaagcgtaacaagcctggcgtggatggaggatgacagccgaattaccatcgtttccagcacccagatcccgcacattgttcgccgcgtggttggtcaggcgctggatattccctggagttgcgtacgagtcatcaaaccatttgtcggtggcggttttggtaataaacaggatgtactggaagagccaatggcggcattcctgaccagcaagcttggcggcattccggtgaaagtttcccttagccgtgaagagtgtttcctcgcaacccgtacccgccacgcttttaccattgacgggcaaatgggcgtgaaccgcgacggaacattgaaaggttatagtctggatgttctgtctaacaccggcgcttatgcatctcacgggcactccatcgcttctgcgggggggaataaagtcgcttacctttatcctcgttgtgcctacgcttacagtagtaagacctgctataccaacctccccagcgctggtgcgatgcgtggttatggcgcgccacaagtcgtatttgccgttgagtctatgcttgatgacgccgcgacagcgttaggtattgatcctgttgaaattcgtttacgcaacgccgcccgcgaaggagatgctaatccgctcacgggcaaacgtatttacagcgcagggttgccggagtgtcttgaaaaaggccggaaaatctttgaatgggaaaaacgccgtgcagaatgccagaaccagcaaggcaatttgcgccgcggcgttggcgtcgcctgttttagctacacctctaacacctggcctgtcggcgtagaaatagcaggcgcgcgccttctgatgaatcaggatggaaccatcaacgtgcaaagcggcgcgacggaaatcggtcagggtgccgacaccgtcttcagccaaatggtggcagaaaccgtgggggttccggtcagcgacgttcgcgttattagtactcaagataccgacgttacgccgttcgatcccggcgcatttgccagtcgccagagctatgttgccgcgcctgcgctgcgcagtgcggcactattattaaaagagaaaatcatcgctcacgccgcagtcatgctacatcagagtgcgatgaatctgaccctgataaaaggccatatcgtgctggttgaacgaccggaagagccgttaatgagcttaaaagatttggcgatggacgctttctaccaccctgaacgcggcgggcagctctctgctgaaagctccatcaaaaccaccactaacccaccggcgtttggctgtacctttgttgatctgacggtcgatattgcgctgtgcaaagtcaccatcaaccgcatcctcaacgttcatgatagtgggcatattcttaatccactgctggcagaaggtcaggtacacggcggaatgggaatgggcattggctgggcgctatttgaagagatgatcatcgatgctaaaagcggcgtggtccgtaaccccaatctgctggattacaaaatgccgaccatgccggatctgccacaactggaaagcgcgttcgtcgaaatcaatgagccgcaatccgcatacggacataagagtctgggtgagccaccaataattcctgttgccgctgctattcgtaacgcggtgaagatggctaccggtgttgcaatcaatacactgccgctgacgccaaaacggttatatgaagagttccatctggcaggattgatttgaggataacatcatgtttgattttgcttcttaccatcgcgcagcaacccttgccgatgccatcaacctgctggctgacaacccgcaggccaaactgctcgccggtggcactgacgtactgattcagctccaccatcacaatgaccgttatcgccatattgttgatattcataatctggcggagctgcggggaattacgctggcggaagatggcagcctacgtatcggctctgcaacgacatttacccagctaatagaagatcctataactcaacgtcatctcccggcgttatgtgctgcggccacgtccattgctggaccgcagatccgtaacgtcgctacctacggtggaaatatttgcaacggtgccaccagcgcagattctgccacgccaacgctaatttatgacgcgaaactggagatccactccccgcgcggtgttcgtttcgtcccgattaatggctttcacaccgggccgggcaaagtgtctcttgagcatgacgaaatcctcgtcgcctttcattttccgccacagccgaaagaacacgcgggcagcgcgcattttaaatatgccatgcgcgacgcaatggatattagtacgattggctgcgccgcacattgccgactggataacggcaatttcagcgaattacgcctggcatttggtgttgccgcgccaacgccgattcgctgccaacatgccgaacagactgcacaaaatgcgccattaaacctgcaaacgctggaagctatcagcgaatctgtcctgcaagatgtcgccccgcgttctagttggcgggccagtaaagagtttcgtctgcatctcatccagacgatgaccaaaaaagtgattagcgaagccgtcgccgcggcggggggaaaattgcaatgaatcacagcgaaacaattaccatcgaatgcaccattaacgggatgccttttcagcttcacgccgcaccaggcacgccgctcagcgaattactccgcgaacaaggactgctaagtgtcaaacaagggtgctgcgtgggtgaatgtggtgcctgtacggtgttggtcgacggcacagcaatagacagttgcttataccttgccgcctgggctgaaggaaaagagatccgcacgctggaaggtgaagcgaaaggcggaaaactttctcatgttcagcaggcttatgcgaaatccggcgcagtgcagtgcgggttttgtacgcctggcctgattatggctaccacggcaatgctggcgaaaccacgcgagaagccattaaccattacggaaattcgtcgcggactggcgggaaatctttgtcgctgcacggggtatcagatgattgtaaatacagttctggattgcgagaaaacgaagtaaaaggatatccggcctgaattcaggccggattcactgaggttatgtgtttaacaactcatatttcttaatcttgcgatagagcgtagcaatgccgatgcccagttcatcagcaacttgcttcttgctgttatgacgactaagcgcctcgcggatcatttgcttttccatctcctccagcgccgtgccgcccgcatcatcgagactcaggtgcgcctcactgacctctgttacatcactttgctccgttgtgccattattcagcagatttggcggcaatagcgtgctgtcgataacttcaccactaggaaccacgttaaccagatattccatcaaattgcttaactcgcgcaggtttccgggccaacgatgcttacgcaatatttcgacgacatcgggagcaatgccaggataaacgcttcccagacgacgggtatgcagatgtaaaaagtaatgcaccaatagttcaatatcttcctgacgttcacgcagcggtggcagagttatcgggataacattaagtcggtagaagagatcttcgcggaatttaccttcggcaatgaactgggccaaattctgattagttgcagaaatgatgcgaatgtcgacttgtattgggctactggcaccaatcggcagaatttcacgtgcctcaatagcgcgcagtaatttagcctgcaacattaatggcatatcacctatttcatcgagaaacagcgtgcccgtattcgccgcctgaatcaaccctgttttaccgttggcagaagcgccagtaaatgcacctttaacataaccgaacagttcgctctccagaagctgctccggaatcgcggcacagttgatagcaataaagggtttattccgtcttccgctcaacttatggattgcacgggcgacgacttctttacccgtgccgctttcaccaaccaccataacgctggatgggctgggtgcaatacggctaatgagtcgttttaattgccgcataacacggcactcgccaaccaattgttcaatatgcggttcatcaggtgcatttgctacagaaaaactggtatggctttggtgaaacgccattaaaaataattgtcggccctgaatgttatgcaattgaccaatgattaattcacttttatcgtcccaactaacaatatgctgcatatgtccatgggtaaaattactctcaaatgttaatggtctgaaacggataggtttcccaataatattattttgcacaacaccaagtgtttttaaggcagtctgattaacaaactgaacccgattttcatcatctacaactaatacgccctgatccatattatcgatcatggtcgcaaatattttactgatgttatctcctggcccctgatcctccagaagtttgctaacaaaaatggtggatatatggcgaacataatcagaaaattcgcgtaaattatcactgatatgctcttgttgctcgtgggtaacggcaatcaaacttatcaccccaacacaacgatcctgtaaaatgacaggcgtacccagaaatgctttttcgcggcaattttctttactatcgcaaccttcgcaaaggggatcgaagcgagactgtgtcacaactttttcagttttcgtttccaggacgtggcggagcaggcgactgttgccgctcaactggcgaccaagaaacttcccatacgcgcccgttccggcaacgcgacacaagttttcatcaacgatctcaacctcaagctgcaaaaacgctggcaagcattctggcaaaacgctgaattgtcggttgaatttgcatcaatacactctgcgtagtagcaagctccatagctttaccttccagacttacttaaaagtcgatcattgaagacgttgatggttcacagatcatgatgatattaactcaggcgaaattggctttgataaaaacataagatttttatcattttctaatgaaattatggaagagatatcacatttctatatcaatatgagaattacggcggtgagtttatcaaactgaagagagatagcctgcccctttatcttatttctgatacttagcagcaaataaataacgcgataaaaaaagccaaacgttttcgtattttacaaacaaccagaagctggcatcaatttgtgatcaaccccacacattatccgtcaaattagtcttttgcagccgcgcggataattctggcacacttattgttagtcccaggtatagctgtgaaaacaccaatcactttggcaagtcacagtgaaataaaccactttgcctgtcattccactaccgggactttatgatgaaaactgttaatgagctgattaaggatatcaatagcctgacctctcaccttcacgagaaagattttttgttaacgtgggaacagacgccagatgaactgaaacaagtactggacgttgccgcagcattaaaagcactgcgtgctgaaaacatcagtaccaaagtctttaatagtggattaggtatttccgtattccgcgacaactccacccgtacccgcttctcttatgcttccgcgcttaacctgctcggccttgcacaacaagatctcgacgaaggcaaaagtcaaatcgctcacggcgaaaccgtgcgtgaaaccgccaatatgatctccttctgcgccgacgctattggtattcgcgacgatatgtatctgggcgcaggcaacgcctatatgcgtgaagttggcgctgcacttgatgacggttacaagcagggtgtactgccacagcgtccggctttagtgaacctgcaatgcgatattgaccacccgactcagagtatggctgacctcgcgtggttacgtgaacactttggtagtctggaaaacctgaaaggtaaaaaaatcgccatgacctgggcctactctccaagctatggcaaaccgctctctgtaccacaaggcatcatcggtctgatgactcgcttcggtatggatgtcaccctggcccatccggaaggctacgacctgatcccggatgtggttgaagtggcgaaaaacaatgctaaagcctccggtggtagcttccgtcaggtcaccagcatggaagaagccttcaaagacgcagacatcgtttatccgaagagttgggcaccttacaaagtgatggaagagcgtactgaattgctgcgtgcgaacgatcacgaaggcttaaaagcactggaaaaacagtgtctggcacagaacgcgcaacacaaagactggcattgtactgaagagatgatggaactgacccgtgatggcgaagccctgtacatgcactgcctgccagctgatatcagcggcgtatcctgtaaagaaggtgaagtgactgaaggcgtattcgaaaaataccgtatcgctacctacaaagaagccagctggaagccttatatcatcgccgcgatgatcctgtcccgtaaatacgccaaaccaggtgcactgctcgagcaactgctgaaagaagcgcaagaacgcgtgaaataacccctcgggccgatcagctggtcggccctctatttccagaggccaaaaggataggatatgtccgttttcagtttgaagattgatatcgccgataacaaatttttcaacggcgaaacaagtccgctctttagccaaagccaggccaaactggcgcgccagttccaccagaaaatagctggttatcgcccaacaccgctttgtgcgctggacgatctcgcaaacctttttggtgtgaagaaaattctcgtcaaagacgaaagtaaacgattcggtctgaacgccttcaaaatgcttggcggtgcgtacgccatcgctcaattattgtgtgaaaaatatcatcttgatatcgaaacgctgagttttgagcacctgaaaaatgccatcggcgaaaaaatgactttcgcgaccaccaccgacggcaaccacgggcgcggtgtggcgtgggcagcacagcaactcggacagaatgcggtgatttacatgccgaaaggttctgctcaggaacgcgttgacgccattctgaacctcggtgccgagtgcatcgtcacggatatgaactatgacgataccgttcgcctgaccatgcaacacgcgcagcagcacggctgggaagtggtacaggacacggcatgggaaggttacaccaaaatcccaacctggatcatgcaaggctacgcaaccctggcagatgaagccgtcgagcaaatgcgtgaaatgggcgtaaccccgacgcacgttctgctgcaagccggtgtcggagcaatggccggtggtgtgctgggttatctggtcgacgtctatagcccgcaaaatctgcacagcattattgttgaacctgacaaagctgactgtatttatcgctccggcgtcaaaggcgacatcgtcaacgttggcggtgatatggccaccatcatggcaggcctggcctgtggcgaacctaacccgctgggctgggaaatcctacgtaactgcgccacccaattcatctcctgccaggacagcgttgccgcattaggtatgcgcgtgctgggtaatccgtacggcaacgacccgcgcatcatctccggtgaatccggcgctgtcggtttgggcgttctcgcagcggttcattatcacccgcaacgtcaaagcctgatggaaaaactggcgctgaacaaagatgccgtggtgctggttatcagcactgaaggcgacaccgacgtgaagcactaccgcgaagttgtctgggaaggcaaacacgctgtagcaccttaatcaccctattggaactgctccctgcaaaacggggagtaaaaaatctggagaaaaataatggctaagaatattccattcaaactgattcttgaaaaagcaaaagattaccaggcggatatgactcgcttcctgcgcgacatggttgctattcccagtgaaagctgcgacgagaaacgcgtagtacatcgtattaaagaagagatggaaaaagtcggcttcgataaagttgaaatcgacccgatgggcaacgttctcggttatatcggccacggcccgcgtctggtggcaatggacgctcatatcgataccgtcggcattggcaacatcaaaaactgggacttcgatccgtacgaaggcatggaaactgatgaactgattggtggtcgcggtacttccgaccaggaaggtggcatggcctctatggtttatgccggtaaaatcattaaagacctcggtctggaagatgaatataccctgctggttaccggtacggtgcaggaagaagactgcgacggtctgtgctggcagtacattattgaacaatccggcattcgcccggaatttgtggtcagtaccgaaccaaccgactgccaggtataccgtggtcagcgcggtcgtatggaaattcgtattgatgttcagggtgttagctgccacggttctgcaccagaacgcggtgataacgccattttcaaaatgggtccgattcttggcgaattacaagaactctcccaacgtctgggttatgacgaattcctcggcaaaggcaccctcaccgtttctgaaatcttcttcacatccccaagccgttgcgctgtagcagacagctgcgcagttagtatcgaccgtcgtctgacctggggcgaaacctgggaaggcgcgctggacgaaatccgcgccctgcctgcagtacagaaagctaacgcggttgtttctatgtacaactacgaccgtccgtcctggactggcctggtttacccaaccgaatgctacttcccgacctggaaagtggaagaagatcacttcaccgttaaagcactggtgaatgcctacgaagggctgtttggcaaagcgccggttgttgataagtggaccttcagtactaacggcgtatctatcatgggccgtcacggcattccggtgatcggctttggcccgggtaaagaacctgaagcgcatgcacctaacgaaaaaacctggaaatctcacctggtgacctgtgccgcgatgtacgctgcaatcccgttaagctggctggcaacagagtaattactcttcacttattcccctccggttcgccggagggtttttggagtttgctatgcgcgtattgatcaaaaacggcactgtcgttaacgcagatggacaagccaaacaggatttgctgattgaaagcgggattgttcgccagttgggcaacaatattagcccgcagctcccgtatgaagaaattgatgccactggctgttacgttttccctggcggcgtggatgtccatacgcatttcaatattgatgtcggcatcgcgcgcagttgtgatgatttttttaccggtacccgcgcagctgcgtgtggcggtacaacaaccattattgaccatatgggatttggcccaaacggctgtcggttacgccatcaactggaggtttatcgtggttatgccgcccataaagcggtcatcgattacagctttcacggtgtgatccagcacattaatcacgcaatcctcgacgaaatcccgatgatagtcgaggaaggactgagcagttttaaactctatttaacctatcaatacaaactcaacgatgacgaggttttgcaggcattacgccgcttgcatgaatccggcgcgctgaccaccgtgcacccggaaaatgatgcggctatcgccagcaagcgggcggaatttatcgccgcagggttaaccgcgccgcgctatcatgccttgagtcgccctctggaatgcgaagcggaagccatcgcccgcatgattaacctggcacaaattgccggtaacgccccgctctatatcgtgcacctgtctaacggcttaggtctggattatctgcgtcttgcccgtgcgaatcaccagccagtctgggttgaaacctgcccacaatatctcctgttggacgaacgcagttacgatacagaagatggcatgaagttcattcttagcccaccgctgcgtaacgtacgcgagcaggacaaactgtggtgtggcatcagcgatggtgcgattgacgtggtggcaaccgatcactgcaccttcagcatggctcaacgcctgcaaatttctaaaggcgatttcagtcgctgcccaaatggcttacccggtgtggaaaaccgcatgcagttactgttttccagtggcgtgatgacgggacgtataacaccggaacgctttgttgaattaaccagcgcaatgcccgccaggttgtttggcctgtggccgcaaaaaggattattagcgcccggttccgacggcgacgtggtgattatcgacccacgtcagagccaacaaattcagcatcgccatctccacgacaacgccgactacagcccatgggagggttttacctgtcagggcgcgattgtcagaaccttatcccgtggtgaaacgattttctgtgacggcacctttacaggcaaagccgggcgaggtcgtttcctgcgacgcaaaccgtttgtccctcccgtgctctaaccactgccagggatctatacacaatcaagaatgatgagtgaggaaaaatgagtaagaaaattgttctcgccctgggcgggaatgcgctgggcgatgacctggccgggcaaatgaaagcggtaaaaattacttctcaggcaattgttgatttaattgcccagggacatgaagttatcgtcactcatggtaacgggccgcaggtgggcatgattaaccaggcctttgaagctgccgcaaaaactgaagcgcacagcccaatgctgccgatgtctgtctgtgttgcattaagccagggttatattggttacgatctacaaaacgctttaagagaagaactgctttctcggggcattaataaacctgtagcaacgctggttactcaggtcgaagtcgacgctaacgatccggcattcctcaacccgaccaagccgatcggtagcttctttaccgagcaagaagcagagcaactgacaaaacagggttacactctgaaagaagatgctggtcgcggctatcgccgtgttgttgccagcccaaaaccggttgatatcattgaaaaagaaacggttaaagctctggtagatgcaggtcaggtggtgatcaccgttggcggtggtggtatccctgttattcgtgaaggtaaccatctgcgtggtgccagcgcggttatcgataaagactgggccagcgcccgtttagcagaaatgattgatgccgatatgctgatcattctgactgcggtagaaaaagtggccattaacttcggtaaagagaatgaacagtggctcgatcgcctgagtttaagtgatgctgaacgctttatcgaagaaggtcattttgcgaaaggttctatgctgcctaaagtggaagctgccgccagctttgctcgctctcgcgcaggtcgtgaagcactgattaccgtattgagcaaagcgaaagaagggattgaaggcaaaacaggaacggtgatttgtcagtaatttaaaggccgggtgggtaataccatccggccaaagattgtcaagtaagtgcgctttgttgatgccggatgcggcgcgagcgccttatccgtcctacaaaacatcgcaaattcaatagattgcaatgcacttgtaggcctgataagcgtagcgcatcaggcaatttggcgtttgtcatcagtctcaggccgggtgggtaataccatccggccattttcatttaagccacttccagcacttcttttgtcgctttcacgccctgatgcatcaacatcattaacgcctcaagtacgccgccgccaatcgcccgggctttatcagaaacgctggtgaaatcagcggtttcaccacgaggatcgatatcaccaattttaaaaccaccaaccactgccaggccgtcgttcaacaagccacgcaccatccccgtcaacggtgctttaatttcatgctcaccaatccaggcaatcacatcgccctctttcaccagatcgcctaatttcacgttggatcgcataatgcctgcagcaggagcacggatcacccgtcgggtggtatgccccataatattgccaggaacaccggtattctcctgcgcacaaccagagtaaatcacctgaccgagccagtgcccgcgatttgtttcaattaccgcatgacaatccttcccagcagtaaagcccggcccaagcgcgattgttactggtgccatatctgcccgcgttcccaaattctgtttcgccagaatagcgtccaccacgcaaagcggtttcagttcatcaagcaaactacaggcgggatctaccatcacaggaatgaatccgcgttcggtaagtttcatcgcttccgcagagctggttgccaggcgagcagtgacgccttcgaccgtcatttcgccatcgaacacggcctgggcaaacgccacggtacaacgaatcactgtcggtttttccacttccagcatgatcactttaaaacccgcatgatacagacgtagcgccacaccactggcgatatctcccgcaccgcgaatcaccaccagctggtgtccggaaggatgagaaggtttcatcatcagcccacccggcgcgttatttttcacctgtaatatttctgccagcacgctgatggcgatctcctgcggcgtttccgcacctatgttgtaaccaacgggcgcatgtaaacgggcaatatgttcttcagccacgcctttctcacgcaattgacgcaggaaaagctgaaccttgcgacgacttgccagcaaccccaaccatgcaatgggctgttcaatgagtttgtcgagggcttcacgatcctgattattcgtggcaatcaggacaaaattatcagggcgaatatccagtgcttccactgccgcaccaaagctctcagcatggagaagcgtggtacttggtgggaatagttcaggattgaggctttcgcgataaatatcagcaacggcaatatcaaatcctaatagcgccgcactctgggctatcgcccggttgacatgccccgcgccaatcaacaccagacgtggacgcataccatggacgctgataaatacactcattgcacctccacaatcactcccgacagcatccgcaccgttacgagccatacgtccatggaataatcgcggcttacgttcctgcaatgcctgaaggctctcttcaatcaccttccgctcaaccattccgccaccaattgtaccgacgatagaaccatcggcgcgcactaacatttgtgcagaatggcggggagtgctgcctcggctatcaacaatttgcgccatagcaaacggacaattttgctcttcgagttttgcagcctctgtgaaaatattcataccaacctcaatggatatcctttcagtaacccggaatacccgggccgttaattcacaaatctgcgcgcgattgcaggatgttcttgtatatcgcccagccagattgcctctacgtcgtgttgttgcagcggttgaaggagctcgctttgtgcaatcgcattctcacattgagaaaaacggttaatgaaccagactcgccgacaaccttgcggtacgtttttaaacgccccctgagggtggcgaaccagcgcaacgagatcgctcagttgcaaggttgcatcaggtgttaacccggtaatatcagcaaactggctccagcgatggacattttctgtgctcactttcgcgcccaaagtatgtcctcccatcacagcaatcacgcagcaactgcttttgggtatgcaaggttcgtgctcatcaggcgcttttaacggcattccacggctgccatctgcttcaatgagaattacgtcacactctggtcgttgcaccagtgcatcaatcgcttctggcgtaaatccctgcacttttccctggttcgctttccagctgtgaaaacaaaaactaatgggggatgtaagagacgcatgaggaagcatggcgggatcacgacagaaaaccacgggccagtgagacgttggcataaacatatgtgtcgtcgtcgtgattaacacacgcctgccgctagcctggagcagttctgccagccaaaaaagcaagctggttttccccccagcaccaacaacagaaatcacagtgggacgtttctgcgcacctaaatcaatgactaatgcgcttgggtcaactatacttttcacgagtctttatgacctctctgggataaattatccccaacttaatccatcaggaagtaacgcaattatcaggcgttattagcccctataaataatggaaccactatgagtgccatcgactgtataattaccgctgccggattaagtagtagaatggggcaatggaaaatgatgttaccctgggaacagggaacaattcttgatacaagtatcaaaaatgcgttgcagttttgtagccgaattattttagtcaccggctatcgtggtaatgaactgcacgaacgttatgcgaaccagagcaatatcactattattcacaacccagattatgcgcagggtttactaacatccgtcaaggccgcagtacccgcagtgcaaacagaacattgttttctcacccacggtgacatgccaaccctcaccatcgatatttttagaaaaatctggagcttacgaaatgatggcgcaatactgccactccataatggcatccccggccatccgattttagtgagtaaaccatgcctgatgcaggcaatccaacgacccaatgtcaccaatatgcgtcaggcactccttatgggagatcattattccgtcgaaatagaaaatgcagaaataattttagatattgatactccggacgactttattacagcgaaggaaaggtatactgaaatttaaaaaacgtagttaaacgattgcgttcaaatatttaatccttccggcactcattatcataatgataaggaatcactgattttgagaaaagagaaaaattgataaatgggctggcaataataattttcaggagtgattttaattctcatttagcacctgtgagttcattcacaaaaagcccttaagtttcgagccgcctcacatttttttatatttcccgccaaacctggcaagagtggtgcgattgttgctctatccccctaaaccaccggatttctcaacaccggtcactcaatgatatctgtataagctaaggagagggttatgggggatattatgcgtcccattccgtttgaggaacttttgacgcgcatatttgatgaataccaacaacaacgcagtatctttggtattcccgagcaacagttttacagtcctgtaaaaggtaaaactgttagcgtcttcggtgaaacctgtgccactcccgtcggccctgccgctggcccgcacacgcagctcgcgcaaaatattgtcacttcctggctgactggcggacgcttcatcgaactaaaaaccgtccaaattcttgaccgcctggagctggaaaagccctgtatcgatgccgaagacgagtgctttaacaccgaatggtctaccgagtttaccctgcttaaagcctgggatgaatacctcaaagcctggtttgccctgcaccttctcgaagcgatgttccagccttctgattccggtaaaagcttcatctttaatatgagcgtcggttacaacctcgaaggtattaagcaaccgccgatgcaacagttcatcgacaatatgatggacgcatctgaccatccgaaattcgctcaatatcgcgatacgctgaataaattactccaggatgacgcatttttagctcgccacggattgcaggaaaaacgcgaaagcttgcaagccttacccgctcgcatccccaccagtatggtgcatggcgtcaccctctccaccatgcacggctgtcctccgcatgaaatcgaagccatttgccgctacatgctggaagaaaaagggctcaacacctttgtgaaacttaacccgaccttactggggtacgcgcgtgttcgtgagatcctcgatgtctgcggtttcggttacataggcttaaaagaagagagttttgatcacgacctcaagctgacgcaagcactggaaatgctggaacgcctgatggcactggcaaaagaaaaaagtctcggctttggcgtaaaactgactaacactctcggcaccatcaacaataaaggcgcactgcctggtgaagagatgtatatgagtggccgtgcgctgttcccgctctccatcaatgttgcagcagttctctctcgcgcctttgacggcaaactgcccatttcttattccggtggtgccagtcagctgactatccgcgatatttttgatacaggtattcgccctattactatggcaaccgacctgctgaaacctggcggctatctgcgcttaagtgcctgcatgcgcgagctggaaggctccgacgcctggggacttgaccatgttgacgtcgaacgactgaacagactggcagcagatgcgttaaccatggaatacacccagaaacactggaagccagaagagcgtattgaagtggcagaagacctgccgctgaccgactgctacgttgccccctgtgttactgcctgcgctatcaagcaagatattccggaatacatccgtctgcttggcgaacaccgctatgccgacgcgctggaactcatctaccaacgcaacgctctgcccgccattaccggtcatatttgcgatcaccagtgccaatacaactgtacccgcctggattacgacagtgcgctgaatatccgcgaactgaaaaaagtcgcgctggaaaaaggttgggatgaatataagcaacgctggcacaaaccagccggttctggtagtcgccatccggttgccgtgattggtgcaggtccggcgggtctggcagcaggttacttccttgccagagcgggccatccggttacgctgtttgaacgcgaagccaatgcgggcggcgtggtgaaaaatatcattcctcagttccgtattcctgcagagttaattcagcacgatatcgattttgttgccgctcacggcgtgaaatttgagtatggctgcagtcccgatttaaccattgagcagttaaaaaatcagggcttccactatgttctgattgccaccggcactgataaaaatagcggtgtgaaactggcgggcgacaaccaaaatgtctggaaaagtctccccttcctgcgtgaatacaacaagggtacagcgctcaagctgggcaaacatgtggtcgttgtcggggcgggtaacaccgcaatggactgcgctcgtgcggcgttacgcgttccaggcgtagaaaaagcaacgatcgtttaccgtcgtagtctacaagagatgcccgcatggcgcgaagagtatgaagaagcgttgcacgacggcgtagagttccgtttcctgaataatccggaacgtttcgatgctgatggcaccttaaccttgcgcgttatgagccttggcgaaccggatgagaaaggtcgtcgtcgtccggttgaaaccaatgaaacagtaacactgcttgtagacagcctgatcaccgccattggtgaacagcaggatactgaagccctgaatgcgatgggcgtgccgctggacaaaaacggctggccagacgtcgaccataatggcgaaactcgtctgactgacgtctttatgatcggcgacgtacagcgcggaccatcctccattgtcgctgctgtcggaaccgcgcgtcgggcgaccgatgccatccttagtcgggaaaatatccgttcccaccagaacgataaatactggaacaacgtcaatccagcggaaatctatcaacgtaaaggcgatatctctatcacgctggtgaacagtgacgatcgtgacgcgtttgtcgcccaggaagccgctcgctgcctcgaatgtaactacgtttgcagcaagtgtgtggatgtctgcccgaaccgcgccaacgtctccattgcggtcccaggcttccagaaccgtttccagacgctgcacctcgacgcttactgtaacgaatgcggcaactgcgctcagttctgtccgtggaacggtaaaccgtacaaagacaaaatcaccgtcttcagcctggcgcaagactttgataacagcagcaacccaggcttccttgtggaagattgccgggtacgagtacgtctgaataaccaaagctgggtgttaaacatcgacagcaaaggtcagtttaacaacgtaccaccggagctgaacgatatgtgccgcatcatcagccatgtccaccagcatcatcattatctgctgggccgcgtggaggtgtaatcatgttgattctgaagaatgtcactgcggtacagctacacccggcaaaagtgcaggaaggcgttgatatcgccatcgaaaacgatgtgattgtcgctatcggcgatgccctgacgcaacgctaccccgacgccagcttcaaagagatgcatggccggattgtgatgccagggattgtctgcagccacaaccatttttacagcgggctttcccgcggaattatggcaaacatcgcccctttgcccggatttcatcagtacgctgaaaaatctctggtggcggctcgatcgcgcccttgatgaagagagcctctattacagcggactgatttgttccctggaagcgattaagagcggatgtacaagcgttatcgatcaccatgcctctccggcgtatatcggcgggagactctccacattgcgcgacgcatttttaaaagttggcctgcgcgcgatgacctgttttgaaactactgaccgtaacaacggcatcaaagagttgcaggaaggtgtagaagaaaacatccgtttcgcccgtttgattgatgaggcgaagaaagcgacaagcgagccgtatctggtggaagcacatatcggtgctcacgcgccgtttaccgtgccggatgccggtctggagatgctgcgtgaagccgtgaaagccacaggccgtggtttgcatattcacgctgcggaagacctttacgacgtttcctacagtcaccactggtacggcaaagacctgctggcacgactggcgcaattcgatctcatcgacagcaaaacgctggtcgctcatgggctgtacttgagcaaagatgacatcaccctactcaatcagcgcgatgcgttcctggtgcataacgcccgtagtaacatgaacaaccatgtcggctacaaccatcaccttagcgacatccgcaatctggcgttgggaacggacggcattggtagcgacatgtttgaagagatgaaatttgccttctttaaacatcgcgatgcgggtggtccgctgtggcctgacagttttgccaaagccctgactaacggtaacgaactgatgagccgcaactttggcgcgaaatttgggcttctggaagccggttacaaagctgatttaaccatttgcgattacaacagcccgacgccgctgctggcagacaatatcgccgggcatatcgctttcggtatgggcagtggcagcgttcacagcgtgatggtcaatggtgtgatggtctatgaagaccgtcagtttaacttcgattgcgattccatttatgcacaagccagaaaagccgctgccagtatgtggcgtcggatggatgcgctggcataaatgacagatgccctcttcccgcagggaagagggttaaataaggaaagaagatgattgaacaatttttcaggcccgactctgtcgaacaggcgctggaactgaagcgccgctaccaggatgaagccgtctggttcgccgggggcagcaaactcaatgctacaccaacccgtaccgataaaaagattgccatttccttacaggatctggaactggactgggttgactgggataacggtgcactgcggattggcgcaatgtctcgcttgcagccactgcgtgatgcgcgatttattcctgcagcgctgcgtgaagccctcggttttgtttacagtcgccatgttcgtaatcagagcaccattggtggtgaaatcgccgcccgccaggaagagagcgtgctgcttcccgtcctgttggcactggatgctgaactggtttttggcaacggcgaaacgctgagtatcgaggactacctggcctgcccatgcgatcgcctgctaaccgaaattatcattaaagatccgtatcgcacctgtgcgacccgcaaaattagccgttctcaggcaggtttaaccgtcgtgacggcagccgttgcaatgacagaccacgacggtatgcgaattgcgctggatggcgtcgccagtaaagcactgcgtctgcatgatgtcgaaaaacaaaatctggaaggcaatgcacttgaacaggctgtcgccaacgccattttcccgcaggaagatttgcggggcagcgtggcctataaacgctatatcacgggagttctggtagccgacctgtatgccgactgccaacaggctggggaggaagccgtatgatcatccactttactttaaatggcgcgcctcaggagctaaccgttaatccaggcgaaaacgtgcaaaagctgttgtttaacatgggaatgcactctgtacgcaacagtgatgatggtttcgggtttgccggttctgacgcaataatctttaacggtaatatcgttaacgcgtccttgcttattgccgcacagttagagaaggcagatattcgtaccgcagaatctctgggcaaatggaacgagttaagtctggttcaacaggcaatggttgatgttggcgtggtgcagtctggttataacgatccagctgcagctctgattatcaccgatcttctcgatcgcatcgccgcacctacccgcgaagagatcgacgacgcgctttctggtttgttcagccgcgatgctggctggcagcaatactatcaggtcattgaactggcggttgcacgtaaaaataatccgcaggccaccattgatatcgctccgactttccgtgacgacctagaagtcattggtaagcattatcctaaaactgatgccgcgaaaatggtgcaggcgaaaccctgctatgttgaagaccgcgtaacggctgacgcctgcgtcattaaaatgttacgtagcccacacgctcacgcactgattactcatctggatgtcagcaaagctgaagccttaccgggcgtcgttcacgttattactcacctgaattgcccggatatctactataccccgggtggtcagagcgcaccggaaccgagtccgcttgaccgccgtatgttcggcaagaaaatgcgtcacgtcggcgatcgtgttgctgcggtcgtcgcagaaagtgaagaaattgcgctcgaagcactgaagctcatcgacgttgaatatgaagtgcttaagccggtaatgagcatcgacgaagcaatggcggaagatgcgcctgtcgtgcacgatgaaccggtggtgtatgttgctggtgcgccagatactctggaagacgataacagccatgcagcccagcgcggcgagcatatgatcatcaacttcccgatcggttctcgccctcgcaaaaatatcgccgccagtattcatggtcatattggcgatatggacaaaggctttgccgatgccgatgtgatcattgagcgaacctataacagtacgcaagcgcagcagtgcccgactgaaacacatatctgctttactcgtatggacggcgatcgtctggttatccacgcctccacccaggtaccatggcacttacgccgccaggtcgcgcgcctcgtgggcatgaaacagcataaagttcatgtcattaaagagcgagttggcggcggttttggttccaaacaggacatcctgctggaagaagtgtgcgcctgggcaacctgcgtgaccgggcgtccggtactgttccgctacacccgtgaagaagagtttattgctaacacctctcgtcacgtcgcgaaagtcaccgtcaaactgggagcgaaaaaagatggtcgcctgacggcagtgaagatggatttccgcgccaacactggcccttacggcaaccacagtctcaccgtaccgtgtaacggaccggcgctgagcctgccgttatatccgtgcgataacgtcgatttccaggtcaccacctactacagcaacatttgcccaaatggtgcttatcagggttatggcgcaccgaaaggtaacttcgctatcaccatggcattagcggaactggctgaacagttacagatcgaccaactggaaattatcgaacgtaaccgggtacacgaagggcaagagctgaaaattctcggtgcaatcggtgaaggtaaagcgccgacctccgttccttccgccgccagctgtgcactggaagagatcctgcgtcagggtcgcgagatgatccaatggagcagtccgaaaccgcaaaatggtgactggcacatcggtcgcggcgtcgccattatcatgcagaaaagcggtatcccggatatcgatcaggctaactgcatgatcaaactggaaagcgacggcacctttatcgttcattctggcggtgcggatattggtactggtctggatactgtagtgacgaaactggcagcagaagtgctgcactgcccaccgcaggacgtgcatgttatctccggtgataccgatcatgcgttgtttgataaaggcgcatatgccagctccggtacttgcttcagcggtaacgcggcgcgtttggcagcggaaaatctacgggagaaaattctgttccacggcgcgcaaatgttgggtgagccagtggcagatgttcaactggcaacgccgggcgtcgtgcgcggcaagaaaggcgaagttagtttcggggatattgcccataaaggcgaaaccggcaccggctttggtagtctggtgggaactggcagttatatcacgcctgatttcgccttcccgtatggcgcaaacttcgctgaagttgccgtcaacacgcgtacgggtgaaatccgcctggataaattctacgccttgctggactgcggtacaccggtcaatccagagttagcgttgggacaaatctacggtgccaccctgcgtgctatcggccacagtatgagcgaagagatcatttatgacgccgaaggtcacccgttaacgcgtgatttacgcagttacggcgcaccgaaaattggtgacattccgcgtgatttccgcgctgtgctggtgccgagcgacgataaagtcggcccgttcggggcgaaaagcatcagcgaaatcggtgtaaatggcgcagctccggcgattgctaccgcaattcacgatgcatgcggcatctggttacgcgaatggcatttcacaccggagaaaatactcactgcgctggaaaaaatataaataataaatggccgcttcggcggcctgtttctctgtttgaacgatgactaaatagtgactgcgaaaatgagataagccgttctcaaggcgtcctgcgccccaaattcgtgggaatttattttactaattcagatgatcaaatttactttaaaaggagtgaagggatgtctgatataaaccatgcaggttctgaccttatatttgaactggaggatcgccctccctttcatcaggctctcgttggtgccattacccatctgttggcaattttcgttccgatggtaacccccgcgttaatcgtgggtgcggccttacagctttccgctgaaacaactgcctatcttgtttctatggcgatgatcgcctctggtattggtacctggttacaagtaaaccgctacggcatcgtcggttctggcctactcagtattcagagtgtcaattttagttttgttacggtcatgattgcgctgggcagcagcatgaaaagcgacggttttcacgaagagttaatcatgagcagccttctcggcgtctccttcgttggcgcatttctggttgtcggatctagttttatcttgccctatttacgtcgggttattacgcctaccgtcagcggtattgtggtactgatgatcggcttaagcctgattaaagtcggcattatcgattttggtggaggatttgcagccaaaagcagcggtacgttcggcaattacgaacatctcggcgttggtttattggttttaattgtggtgatcggctttaactgctgtcgcagtccgttgctacgcatgggagggatcgccattgggctatgtgtcggctatatcgcaagcttatgcctgggcatggtggatttcagcagtatgcgcaatttgccgttaatcaccatcccgcatccgttcaaatacggctttagttttagcttccatcagttcctggtggttggcacgatttatctgcttagcgtgctggaagcagtcggcgatatcaccgccacggcaatggtttcccgccgccccattcagggggaagagtatcagtcccggctgaaaggcggcgtgctggcagatggtctggtttctgttatcgcctccgctgtcggtagtttaccattaaccacgtttgcgcaaaataatggggttattcagatgactggcgtcgctagtcgttatgtcgggcgaaccatcgcggtaatgctggttatcctcggcttatttccgatgattggcggcttcttcacgaccattcccagcgcagttctgggaggcgcaatgacgttgatgttttccatgattgccatcgcagggattcgcatcatcatcaccaacggtttaaagcgccgtgaaacacttattgtcgccacttctttaggtttagggcttggcgtctcctacgatcccgaaatttttaaaatattgccagcctctatttatgtattagttgaaaaccctatttgtgctggcgggttaactgcgattttattaaatattatcctccctggtggctaccgacaggaaaacgttctgcctggtattaccagtgcggaagagatggattaacagtaaaggagtcaatgatgagtggagaacacacgttaaaagcggtacgaggcagttttattgatgtcacccgtacgatcgataacccggaagagattgcctctgcgctgcggtttattgaggatggtttattactcattaaacagggaaaagtggaatggtttggcgaatgggaaaacggaaagcatcaaattcctgacaccattcgcgtgcgcgactatcgcggcaaactgatagtaccgggctttgtcgatacacatatccattatccgcaaagtgaaatggtgggggcctatggtgagcaattgctggagtggttgaataaacacaccttccctactgaacgtcgttatgaggatttagagtacgcccgcgaaatgagcgcgttcttcatcaagcagcttttacgtaacggaaccaccacggcgctggtgtttggcactgttcatccgcaatctgttgatgcgctgtttgaagccgccagtcatatcaatatgcgtatgattgccggtaaggtgatgatggaccgcaacgcaccggattatctgctcgacactgccgaaagcagctatcaccaaagcaaagaactgatcgaacgctggcacaaaaatggtcgtctgctatatgcgattacgccacgcttcgccccgaccagttctcctgaacagatggcgatggcgcaacgcctgaaagaagaatatccggatacgtgggtacatacccatctctgtgaaaacaaagatgaaattgcctgggtgaaaagcctttatcctgaccatgatggttatctggatgtttaccatcagtacggcctgaccggtaaaaactgtgtctttgctcactgcgtccatctcgaagaaaaagagtgggatcgtctcagcgaaaccaaatccagcattgctttctgtccgacctccaacctttacctcggcagcggcttattcaacttgaaaaaagcatggcagaagaaagttaaagtgggcatgggaacggatatcggtgccggaaccactttcaacatgctgcaaacgctgaacgaagcctacaaagtattgcaattacaaggctatcgcctcagcgcatatgaagcgttttacctggccacgctcggcggagcgaaatctctgggccttgacgatttgattggcaactttttacctggcaaagaggctgatttcgtggtgatggaacccaccgccactccgctacagcagctgcgctatgacaactctgtttctttagtcgacaaattgttcgtgatgatgacgttgggcgatgaccgtagcatctaccgcacctacgttgatggtcgtctggtgtacgaacgcaactaataataaaactttaacatcctcgtgaggacatcattatgtctggagacatcctacaaacaccggacgcaccaaagccacagggcgcgctggataattattttaaaattaccgctcgtggcagtaccgttcgtcaggaagtactggctggcttaacgacctttctggccatggtttattccgttatcgtcgttccgggaatgctgggcaaagcaggttttcctcccgcagctgtgtttgttgccacctgtctggtcgcgggcttcggcagcttgctgatgggattatgggctaatttgccaatggcgattggttgcgcgatttccttgacggcgtttaccgcattcagtctggtactcgggcaacaaattagcgttcctgtcgcactgggcgcggtatttctgatgggcgtcatcttcaccgccatttccgtaaccggtgtgcgtacctggatcttacgtaatttgccgatgggtatcgctcacggtacaggtatcggtatcgggctgtttctgctgctgattgctgctaacggtgtgggtatggttatcaaaaacccgattgaaggcttgccagtggcgctcggtgcgtttacctccttcccggtgatgatgagcttgctggggctggcggtcatcttcggcctggagaagtgtcgcgtacccggcgggatcttgttggtgattattgcaattagcatcatcggcttaatctttgacccagcggtgaaataccacggtctggtggcgatgccaagcctgactggcgaagatggtaagtctctgattttcagcctcgatattatgggtgcactccagccaactgtacttccgagtgtactggcattggtgatgaccgcagtgttcgacgctactggcaccatccgtgccgtcgccggtcaggcgaatttgttggataaagacaaccagatcatcaacggcggcaaagccctgaccagtgacagtgtaagtagtatattctccggcctggtgggcgcagcgcccgcagcggtttatatcgaaagtgcggcaggaaccgccgccgggggtaaaacaggtttaaccgcaaccgtagtgggggcgttattcctgttaattctgtttttaagtccgctgagttttttgatccctggttacgccactgcacccgctctgatgtacgtaggtttgctgatgttaagtaacgtcagcaagctggatttcaatgattttattgacgctatggctggcctggtgtgtgccgtgttcatcgttctgacttgtaatatcgttaccggtattatgctgggctttgtgacactggtcgtaggccgcgtctttgcacgcgaatggcaaaagctgaatattggtacggtgatcattactgccgcactggtcgcattttacgcgggtggttgggcaatctaatagattctccgcgcctttcagcgcggagatttctttcagagaggattctcaccgctggcaacaatacgctgctggcggactcgcctgagttctctttcagtaagcaactgcagcgcctgtgttgggcaagattcaacgcaggctggcccctcttcccgctgttcacagagatcgcatttcacaatttgttgtcgggtatcccccggcaagctctgaatggtgatcattccaaacgggcacgcactgacgcaactctgacagccaatacaacgggcagaattggtctgcaccacctgctcgcccatcgtcagcgcccccacggggcaagcgccaacacaaggggcgttttcacactgatggcacatcaccggcgcactgatgctgtccagtcgctgtaccttcagccggggtaaaaagacatcggcattcaactcctgttcactagggtgagcgaccacacaggctacttcacaagtacggcagccaatacagtcagccggattaacgataattaagcttttcatcagcttgccttcgtatcaaacagagttaacatatcgcgcgccgcctgccttcctgcggccattgcagtgacaaccagatccgcgccatgaactgcatcaccaccagcaaagacttttttcagatgcgtctgggtaggtaaatacccgacgtcaccggtttgaatcaggccccatttatcgagtttaattccgctgccctgcaaccacggcatggcatgcgcctggaaaccaaaggccataatcagaacatcggcgggcaattcaaactcactacccgctaccggacgaggacgacggcgaccatccggccccggctcacccatggcggtacgaatcaggcccaccgcagttaaacgcccatcttcgtcacaagcgatatattgcggttgaacattgaactgaaactcgacaccttcctcgcgcgcattaaccacctctttgcggctgcccggcatactgacttcatcacgacgatacgcgcaggtcacgctggcggcattgaggcggatggaagtccgcaaacaatccattgtcgtatcgccaccgcccaataccacgactcgcttaccttccacgtccgtcagcggatactcttcagactccggcaatcccatgagctggcgggtatgggcagtcaggaacggtagagcctgaatgacaccgggcgcatcttcatgcggcagatctgctcgcatcatcccgtaagtccccacgccgatgaaaactgcatcatattcagaagttaaatcgctaaaggtaatatcgcggccaatttcacagttaagatgaaagtcgattcccattgcggtgaatatctctcgccgctggcttaataccgttttatcgagtttgaaaggaggaatgccaaaagtcagcataccgccaatttctggatggcgatcaaagacatcgacctgaactcctgcgcgcgccagaatatcagcacaccctaaccctgcaggcccagcgccaatcaccgccactttttcgctacggggaacaactttgctgacatcgggacgccaacccatcgccagcgcggtatcggtgatgtagcgttccagattaccgatagagactgcgccgctgtgatctttcaaagtacatgcgccttcacaaagacggtcctgtggacataccctgccgcaaatttctggtaaggaactggtctggtggcaaagttctgccgcttcaataatctttccttcctgtaccagacggatgtaatccggaatagcgttatgcagcgggcaatgccagttgcagttagctttttcggcacaataaacacagcggtcactctcataagtcgcttgttgtggatccagcccgcaatatatttcgccaaagtgggttttccgttcactcgcactaattttatctgcgcctttacggctgttaacggggagcaacgctgcactgcgagatggctgagcgtcactactcgcttttcctgctgccgttttgcgctggcgggccacctttatctgctgcaaccctttatcgtccatcagtcgtaacgcctgtgttgggcaaacttcaatacaggcttgcgtgccggaactgcgctggttacaaaggtcgcatttctgcgcaatcgtatcgaccatctcaacgacgccaaaggggcaagcgattgcgcatcttttacaaccaatacatttttgctcgtccagttgtacgctatcggactggaaagtcagagcattaaccggacaagccgtaacgcaaggggcattgttgcagtgatggcaggccaccggattcgcagcctggcctttccctacaacgtggatacgcggtcgaaagtcactgtgactcagcggccagttttcttgattgtgtgccaccgcacaggcaatttcacaagcatgacagcctatacattccgcagcttcagcagcaataaacttattcatttgcatccctttcatttaatgagttatgtcttctcaaatttcgcgatgcaataaacgggcatatattaggtagcatgaccgttttaattataattttgcgactgagttcaaattattgcccctcaatctatgccgctttcattatttcaacattgccgatcaaaagagcgctatccagataaaaacgattaaatgcgagagtgcgacatgccagaatgattaatgaaatatcaatatgagaaaattacagataattccattgtcaggttctcttctcattttcgtggtttaaccacgattatgtgattgcctccgcaattcctgtctctaactccccttcctcgcaaaaactggcactccacgagcatgtgtttagacagtttcattaacgtaaacggttgctttttactctggcgggcgaaaggagaaacactgatgagcgccatagattcccaacttcccagttcttctgggcaagaccgcccaactgatgaggttgaccgcatattaagtccaggaaagctgatcatactcggtctgcaacacgtccttgtcatgtacgcaggtgcagtcgctgttcctcttatgattggtgaccgactgggcctcagtaaagaagctattgcgatgctcattagcagcgatctcttttgctgcgggatcgtcacattattgcaatgtatcggtatcggccgctttatggggatccgcctgccggtgattatgagcgtgacctttgctgctgtaacaccaatgatagccattgggatgaacccggatatcggcctgctggggatatttggtgccactatcgccgcgggttttatcaccacattattagcgccacttatcggtcgcttgatgcctttattcccgccactggttaccggtgtggttattacttctatcgggcttagcatcattcaggtgggtattgactgggccgccggaggtaaagggaatccgcaatatggtaatcccgtttatttaggtatctcctttgccgtcttaatttttatcttgctcattactcgctatgcgaaaggatttatgtccaacgtcgccgtattactggggattgtatttggctttttacttagctggatgatgaatgaagtcaatttatccgggctacatgatgctagttggtttgcgattgttacgccgatgagctttggtatgccgattttcgatcccgtttccattctgaccatgactgccgtgttaatcatcgtgtttatcgagagtatggggatgttcctggcactgggtgaaatagtcggtcgtaaactctctagccacgatattattcgcgggctgcgtgtcgatggcgtagggacaatgataggcggcacgtttaacagcttcccccacacgagtttttctcaaaacgttggcctggttagcgtgacgcgcgttcatagccgctgggtgtgtatttctagcggaattatattaatcctgtttggcatggtgccaaaaatggcggtgctggtagcctccattccgcaatttgtgctgggcggcgctggtctagtgatgttcggcatggtactggcgacagggattcgaattctgagccgctgtaactacaccaccaaccgttacaacctctatattgtggcgatcagtctcggcgttggcatgactccgacgctctctcacgatttcttttctaagttaccggccgtactgcaaccgctgctacatagcggcattatgctcgcaacccttagcgccgttgtgctgaacgtcttctttaatggctatcagcatcatgctgacctggtgaaggaatccgtctctgataaagatttaaaagtcaggacagtacgtatgtggcttctgatgcgcaagctgaagaaaaatgagcatggagaataatatgaattttttaatgcgcgctatattcagtctgttgttgctttttactctctctattcctgtcatttctgactgtgttgcaatggccattgaaagtcgcttcaaatatatgatgctacttttttaaatggtttttacctgtcggcatccgctcaaaacgggcggttgtcgataaacgctcacttggttaatcatttcactcttcaattatctataatgatgagtgatcagaattacatgtgagaaattatgcaaacggaacacgtcattttattgaatgcacagggagttcccacgggtacgctggaaaagtatgccgcacacacggcagacacccgcttacatctcgcgttctccagttggctgtttaatgccaaaggacaattattagttacccgccgcgcactgagcaaaaaagcatggcctggcgtgtggactaacagcgtttgtgggcacccacaactgggagaaagcaacgaagacgcagtgatccgccgttgccgttatgagcttggcgtggaaattacgcctcctgaatctatctatcctgactttcgctaccgcgccaccgatccgagtggcattgtggaaaatgaagtgtgtccggtatttgccgcacgcaccactagtgcgttacagatcaatgatgatgaagtgatggattatcaatggtgtgatttagcagatgtattacacggtattgatgccacgccgtgggcgttcagtccgtggatggtgatgcaggcgacaaatcgcgaagccagaaaacgattatctgcatttacccagcttaaataaaaaaaccccgacatttgccggggttgtgagcataacgtaatgcttattttaccggacgcatcgccgggaacagaataacgtcgcggatggtatggctgttggtgaacagcattaccatacggtcgataccaattcccagacctgctgtcggcggtaagccatgttccagtgcggtgacgtaatcttcatcgtagaacatcgcttcgtcgtcacctgcgtctttcgcggcaacctgatccaggaagcgttgcgcctgatcttccgcgtcattcagctcgctaaagccgttaccgatttcacgaccaccaatgaagaactcaaagcggtctgtgatttccgggttaacgtcgttacgacgcgccagcggagaaacttctgccggatattcagtaatgaaggtcggctgaatcagatgtgcttctgccacttcttcgaagatctcggtaacgatacggcccagaccccagctcttctcaacgtggatgccgatagattcagcaattgctttcgcagagtcgaagttgtccagatccgccatgtcggtttccgggcgatatttcttgatcgcttcacgcatggtcagtttttcgaacggtttaccgaagtccagcgtcacgtcgccgtaggtcacttccgtcttaccgagaatatcctgtgccagagtacggaacaggctttcggtcagctcgatcagatctttgtaatctgcgtaagccatgtagagttccatcatggtgaactctgggttatgacgtacggaaataccttcgttacggaagttacggttgatttcgaatacacgctcgaagccaccaaccaccagacgcttgaggtacagttccggcgcgatacgcaggtacatgtcgagatccagcgcgttatggtgggtgataaacggacgcgcagcggcaccgccagggatcacctgcatcatcggcgtttcaacttccataaagccgcggttcaccatgaactggcgaataccagagaggatctggctgcgcactttaaaggtgttgcgggattcatcgttggagatgagatcgagataacgctgacgatagcgcgcttcctgatcctgcaagccgtggaatttatccggcagcggacgcagtgctttggtcagcagacgcaactcggtgcagtggatagacagttcgccggttttggttttgaacagcttacctttcgcgccgaggatgtcgccgaggtcccattttttgaactgctcgttataaacgccttccgggagatcgtcacgggcaacgtacagctgaatgcgaccgccaacgtcctgcagggtaacgaaagacgctttacccataatacgacgggtcatcatgcggccagcaacggcgacttcgatgttcagcgcttccagttcttcgttctctttgccgtcgaattctgcgtgcaattggtcagaggtatgatcgcgacggaaatcgttcgggaaggcaatcccctgctcgcgcaggttcgccagcttctcacgacgcgttttcagttcattgttaagatcgactaccgcgtcagcgccctgtgcgtgttgttcagacatgttggttcctcataaccctgctttcaaacttgcttcgataaattgatccaggctgccgtccagcacggcctgcgtgttgcgggtttctaccccggtgcgcagatctttaatgcgggagtcatcaaggacataagaacgaatctggctgccccagccgatgtcggatttgttatcttccatcgcctgtttctcggcatttttcttctgcatctccagttcataaagcttcgctttcatctgcttcatggcctgatctttgttcttgtgctgggaacggtcgttctggcactgggtcacgatcccggtcgggatgtgggtaatacgcaccgcagattcggtacggttaacgtgctgaccgcccgcgccggacgtgcgataaacgtcaatgcgcagatccgccgggttgatttcgatatcaatatcatcatcaacttccggataaacaaacgcggagctgaagctcgtgtggcgacgaccgccggagtcaaacgggcttttacgcaccaggcggtgaacgccggtttctgtacgcagccagccgtaagcgtaatcgccggagattttgatcgtcacggatttaatacccgccacttcaccttcgctctcttcgatgatttcagttttgaaaccacggctttctgcccagcgcagatacatacgctcaagcatgctcgcccagtcctgtgcttccgtaccgccagaccccgcctgaatatcgaggtagcagtcggcgctgtcatattcgccagagaacatacggcggaactcaagctgcgccagtttttcttccagggcgtcgagttcagcaacggcttcgttaaaggtttcttcgtcgtcagcttctacagccagttccagcagaccagaaacatcttccagcccctgtttcatttggtcgagggtgtcgacaacggcttcgagggaggaacgctctttacccagcgcctgtgcgcgttcgggttcgttccagacatccggctgttccagctcggcgtttacttcttccagacgctctttcttggcgtcgtagtcaaagataccccctaagaacgtcggagcgttccgtgaggtcctgaatgcgattatttaccggattaatttcaaacatggtctgatttcttttattgagctagtcaaaatgcggtgataagagcgggattgtacccaatccacgctcttttttatagagaagatgacgttaaattggccagatattgtcgatgataatttgcaggctgcggttgccgcgaaactcgttgatatcgagcttataagccagttgcacttcgcgcacgccgttatccggccagagggcggtatcgacattaaaagcaataccatccagcagtggaccgccgccgaccggttcgaccatcaccttcaaatgacgttcgcccaccagccgctgttgcagcagacggaaatgaccgtcaaacagcggctccgggaacatctgcccccacgggccagcatcgcgcagcagctgcgccacttccatggtcatttcggccgggcttaacggaccgtcacttaccacttcgccttgcaataggctagggtccagccactcagtaaccagttcgccaaaccgttgttgaaagagtttgaatttatcctcttccaggctcaaacccgccgccatcgcatgaccgccaaacttcagcatcatgccagggtagagtgtgtctaatcgctccagcgcatcacgcatatgcagcccctgaatggagcgaccggaacctttcagcgtaccgtcacctgctggcgcaaacgcgataaccggacggtgaaaacgctctttgatgcggctagccagaataccgacaacgccctgatgccattcggggtgatacattgccagcccgccgggtagcgtgtcacggctgcgctccagtttctcgcacagggtcagggcttcaatttgcattccttgttcgatctcttttcgcgtctggtttagcgcatcgagttcatttgccagcacgcgcgcttcgccgatgttgtcgcacaacaacagcgccacaccgacggacatatcgtccagtcgtccggcagcattgagacgtggccccagcgcaaaacctaaatcgctggcggcgagtttttgtgcatcacggtttgccacttcaagcagcgctttaatccccggacggcactttccggctcggatgcgactcatcccctgccaggtcagaatgcgattattagcgtccagcggcacgacgtccgccactgtccccagcgcgaccagatccagcagttctgccaggttaggaattgcgatgttacgctcatcaaaccagccctgatcgcgcaaaaaggtgcgcagcgccagcatcagataaaacgccacacccacgcctgccagacttttgctcgggaaattacagtcgcgcaagttagggttaatgatcgcttccgctgcgggtaatgtgtcgcctggcaaatggtgatcggtaacaataaccgggatgcccaagctgcgagcgtgctcaacccccgcatgggaggaaataccgttatccaccgtgacaattaactgcgcgccacgggcatgggcctgatcgaccacttccgggcttaagccgtaaccgtcttcgaaacggtttggtaccaggtagtcgatattgctgcaaccaaggctgcgcatcgccagcacgcttagagccgtgctggtcgcgccgtcggcgtcgaaatcaccgaccacaataatccgcgttccttcgcgaaaagcgttgtaaaggatctcaacggccttttcgacgccgctcagttgctgccagggcagcatacctttaacactgcgttccagttcttgcgcactgcgtactccccggctggcgtataaacggcgcagcaagggaggcaattcagcgggcaagtctgccgtttcatcgacttcacggcgacgaagttgtatctgttgtttcacgcgaattatttaccgctggtcattttttggtgttcgtcgaggaattctttcatctctttcggcggctggtaacccggaacaagtgtgccattgctcagcacaactgccggagtaccgctaacgccaagctggacgccaagtgcgtaatggtcggcaatatccacgtcgcaactggctggtgcgacgcttttacctgccatcacatcatcaaacgctttgtttttatctttcgcacaccagatagctttcatttctttctctgcatcgctgtccagcccctggcgcgggaaagcaagataacgcacggtgatccccagcgcgttgtagtctgccatttgctcatgcagtttgtggcagtaaccacaggtaatatcagtaaacacggtgatgacgtgtttttcctgcggcgctttataaacgatcatctctttttcaagcgcattcaactgctttaacagcatcttattggtgacattgaccggagccgtgccactaacgtcatacattggcccctgaatgatatgtttaccatcatcggtgatgtacaacacgccgctgttagtcagaactgtcttcatgccagctacaggcgcgggctgaatatcgctgcttttgatgcccattttggctaacgtttgttgaattgccgcgtcatcagcctgagcaaagccactaaacgccgctaacaaagtaaacaacataaaacctttcttcataaatcttcccgttcttttcagacatcacgcccgcgggtgatgctgttgatgaagttgccgcagacgctcggtagcgacatgcgtataaatttgcgtggtggagagatcgctgtggcccagtagcatctgcaccacgcgtaaatccgcaccatgatttaataaatgagtggcaaaagcgtgacgcaacacatgcggactcagcttttcgctgtcgatacccgccagcacagcataatgtttaatacggtgccagaaggtctgtcgcgtcatctgctgcgcacgctggctgggaaacaacacgtcaatactcacaccattcagcagccacggacgcccatgttccagataggtttccagccagtaaaccgcctcttcacctaacggcaccagacgctctttgttgcctttaccaatgacccgtaccacgccctgacgcaggctgatatcactcattgtcagtccgaccagttcagagacacgcagcccggtagcatacaacacttcaagcatggctttatcgcgtagctccagtggctgatcgattaatggtgcctgtaataaacgttcgacctgcgcttcgcttaaatcttttggcaaacgctggggcaatttcggactagcgagatgcgcactgggatcgtcttcacgaaacttttcgcgataaagatactggaacaatcggcgcactgcactcagcaaacgcgcactgctggtggctttatacccgccctccagccgttctgccagtaatgcctgcaaatcgtcactttgcgccgtcgccagcgtcaacccgcggtgatgcaaccactccaccatcatactcagatcgcgacggtaagcgttcaacgtattttcagccagatttttttccagccacagagcatcaagaaactgctcgatgcgtgccagatcctgtttcacttgcgccccttatggtcactcatttgatccattatgccttattgtgccgtgactaaagcgattctgatacactagccgcaaaagccacagcagaatcgagaagcttacgttatgaatatgggtcttttttacggttccagcacctgttacaccgaaatggcggcagaaaaaatccgcgatattatcggcccagaactggtgaccttacataacctcaaggacgactccccgaaattaatggagcagtacgatgtgctcattctgggtatcccgacctgggattttggtgaaatccaggaagactgggaagccgtctgggatcagctcgacgacctgaaccttgaaggtaaaattgttgcgctgtatgggcttggcgatcaactgggatacggcgagtggttcctcgatgcgctcggtatgctgcatgacaaactcagcaccaaaggcgtgaagttcgtcggctactggccaacggaaggatatgaatttaccagcccgaaaccggtgattgctgacgggcaactgttcgtgggtctggcgctggatgaaactaaccagtatgaccttagcgacgagcgtattcagagctggtgcgagcaaatcctcaacgaaatggcagagcattacgcctgatctcactgacggcttagcgcatatgctttgccgtcatctttatctttgcgtctcttgttgcaacaaaatccgccgtaaatcccgccattcagcttcgtccatgctgtcggctgccagccataaatgttgccgtttaccgccatcagaacgtaaacgcagcatcatgccgctcttaatcatccacggtgctttgacgatgctccactcctgcccttgccaacgcaaacgcccgtccatcaacaagcgaatttccccctggcgagcattaatacgccgctggctgcgaacgcaatcaaacaccaccaggctaagtaacaccatccataacggggtgtaactgagtggccagggcatgagtaaaataacagcggcaaccagcccatgaatcagcaaggaaagccactgtgcgcgccaggagacgcgcaaatcagattgccacaggaccacgttcccggttccgtgtctggatgagtcggaccatcatttccagttctgcatcggccggtttaccgtgattcatcagccagttaaacaggtccggatcgtcacattccagcagacgaataaagatgcgtttttcgtcatcgcttaagctgtcgtactcatgttcgaaaaacggcatgatactaatatcgagttcgcgcataccacggcggcatgcccaatgaatgcgggctttgttgttaatgtccatcttcttcctgtctcacgaaaatccagtacccggctattgtaacgtgtttttcgccttcttttacgggaatatcagtaaacaccatcgcgatcgcgaaattaattcacaacaattcaatggcttcatttttttggaagtcgcctcgcagaaggcacagatcgcgtagtgaaagcacttgcattgcctcatagctcttttaccattagtcattaatacgccgttaagcaactcaggactctattatggcttttacaccttttcctccccgtcagcctacggcttctgcccgtttaccgctgacgctgatgacgcttgatgactgggcgcttgccaccattactggcgcggacagcgaaaaatatatgcagggtcaggtgacagcagatgtcagccagatggcagaagatcagcacctgctcgccgcccattgcgacgccaaaggtaaaatgtggagcaatttacgtctgttccgcgacggcgatggctttgcatggattgaacggcgcagcgtgcgtgaaccgcagctgactgaactgaaaaaatatgcggtattctctaaagtgaccatcgcgccagacgacgagcgtgtgctgcttggtgttgccggttttcaggcgcgcgccgcgctggcaaatctctttagcgaactgcctagcaaagaaaaacaggtagtcaaagaaggcgcgaccactttgctatggtttgaacacccggcagaacgtttcctgatcgtaaccgatgaagctactgctaatatgctgaccgataaactgcgcggtgaagcggaactgaacaatagccaacagtggctggcattaaacattgaagcgggtttcccggtgattgatgccgccaacagcgggcagtttatcccacaggcgaccaatctccaggcgctgggcggtatcagctttaagaaaggctgttataccggacaagagatggtggcgcgagcaaaattccgtggtgccaataaacgtgcgctctggttgctggcaggtagcgccagccgactgccggaagctggtgaagacttagagctgaaaatgggcgagaactggcgtcgtaccggtacggtactggctgcggtaaaactggaagatggtcaggtcgtggtacaggtcgtcatgaataacgatatggaaccggatagcatcttccgcgtacgcgacgatgcgaatacattgcatatcgagccgctgccgtatagcctcgaagagtaaatctctttatcgcatcaggcatttatcgcctgatgcgacgctggcgcgtcttatcatgtctgggatttgatgcctttatcacaacagggacgaggcccgtagatcggataaggcgttcacgccgaatccggcagttgtgctccgatgcctgatgcgacgctggcgcgtcttatcaggcctacaaaggcatacccattacgcctgcccaatatacaaatagatcgccagaaagtggcacacactaccgccgagcacgaagccgtgccagatggcatggttgtatggaatgcgtttgcagacgtagaaaatcaccccgaggctataaaccacgccgcctaccgccagtaaggtaacgctgcccgccgcgagcttaactgccatttcataaattaccaccaggctcagccagcccatcgccagataggtcaccagagataaaattttgaatcggtgcgcgatggtcagtttaaacagaatacccagcaatgccaggctccagataacaatcatcaacccgcgcgctaacggagaatccagccccaccagcaaaaacggcgtgtaggttccggcaatcaacaggtaaatagcgcaatggtcaaatttcttcagccacatttttgcccgttgatgaggaatggcgtgatagagcgtgctagcgaggaacagcaggatcatactgccgccatagaggctgtagctggttatcgctgtggcgctggcattaagatccaccgcctgaaccagtagcaacaccagcccaacgataccaaacaccaacccaatgccgtgactgacgctgttggctatttcctctgccagactatatccctgcttaatgaggggcttctgaaccataacttactccggagaaacgtacacgcacatgtatacctctccagcgtaactgagaatagttccagtgaacacctgttagctaaaataaattctgatttgagactaatctcctaaaaatcatgaaattaaatgcgaaatttcaactaacaggcgtgagttcaatttaaagacatttaaattcaatcacataaaattgtgtctgaccgggatagatgtcagcaatgacttttttcagttcagtcagggtcatattttcctgctctgcatgtttttcagtcagcgtatccagcgttacggtactggttgcggtgacttcaatcgtgcaaaaataaccgtcatcttcaaaacgtccgacacgaagcacatcacccgttttgaagtggctttcagactcgtcgcggatggtgatggttttacgcccagccagaatgtcatcctggaaacgttgaaaaaaagtgatgtcgtttggctgcatggtactatttcctgtaagaattgactcatctggagcctatgatagtgaaaaaactcaccttaccgaaagatttcttatggggcggcgcagttgccgctcatcaggtcgaaggcggctggaacaaaggcggaaaagggccgagcatttgtgacgttctgaccggtggcgcacacggcgtgccgcgcgaaatcaccaaagaagtcttgccaggaaaatactatccaaaccatgaagccgttgatttttatggtcactataaggaagacatcaagctatttgccgaaatgggcttcaaatgttttcgtacatccattgcctggacgcgcatttttccaaaaggcgatgaagctcagccaaacgaagaagggctgaagttctacgatgatatgttcgatgaactgctgaaatacaacatcgaaccggtgatcaccctctcccactttgaaatgccgctgcatctggtgcagcaatacggtagctggaccaaccgtaaagtggttgatttctttgtacgtttcgcggaagtggtatttgaacgctataagcacaaagtcaaatactggatgaccttcaacgaaattaacaaccagcgtaactggcgtgcaccgctgttcggttactgctgctccggcgtggtgtataccgagcatgaaaacccggaagagacgatgtatcaggtgctgcatcaccagtttgtcgccagcgccctggcggtgaaagctgcgcgtcgcattaacccggagatgaaagtcggctgtatgctggcgatggtgccgctctatccttactcctgtaacccggacgatgtgatgttcgctcaggagagcatgcgcgaacgctacgtctttaccgatgtgcagctacgcggctattacccgtcctatgtgttgaacgagtgggagcgtcgcggatttaacatcaaaatggaagacggcgatctggatgtgctgcgtgaaggcacctgcgattatcttggtttcagctattacatgaccaatgcagtgaaggccgaaggcggcaccggcgatgcgatctctggttttgaaggcagcgtaccaaacccgtatgttaaagcatctgactggggctggcagattgatccagtaggtctgcgctatgcactttgcgaactgtatgagcgttatcagaggccgctgtttattgtcgaaaacggttttggcgcttacgacaaagtggaagaagatggcagcatcaacgacgactaccgcattgactacctgcgcgcccatatcgaagagatgaaaaaagcggtgacttacgatggcgtggatctgatgggctacacaccgtggggctgcatcgactgcgtgagcttcaccaccgggcagtacagcaaacgctacggctttatctatgtgaataaacatgacgacggtactggcgatatgagccgtagtcgtaagaagagctttaactggtacaaagaggtgattgccagcaacggcgagaagctttaagtcgatgaagtaccggatgcaatacttgttgcatccggtcagacaacttccctgttttatttcccgcccgccaaatcgataaaacttcccgtgacgtaagaggctttatcacttagtagccagacaatggcctgcgcgacctcttctgcctgtccaccacgctgcatggggatgttgctcttaacgcgatcgacgcgtccaggctcgccgccgctggcgtgcatttcggtataaataaaccctggccgcacgcagttaacgcggatcccctgcgcggcgacttccaggcttagtccggtggttaacgtatcaatcgcccctttgcttgccgcgtaatcaacatattcccctgggctacccaaccgactggccacgctagagacattgacgatagcgccgccactgccaccatttttaagcgccatgcgttttaccgcctcgcggcagcagagaaaatatcccgtcacgttggtggaaagtactcggttgattcgctctgcggtaaggttttcaacggtgcactgggtaaacaagatcccggcgttattgaccagcgctgctagcggttcatcgtgctgatcgattgctgtaaacatcgcaacgacctggttttcgtcgctgatatccgcctggagcacgaatgctttgccaccggcttgcgttattaagttcatcacttcctgcgccgcgtggaggttttgctgataattaaccgccaccgtatacccttcttgcgccaacagtaatgcagttgcccgcccgatgccgcgactgccaccagtcacaagtgctatagccatttgtttttccgagaaaaattaattcgttgacgtatctttgagattgctaacaaactggctcaatcttcaatgttggcacgcttttccccctcgccctttcagggagagggccggggtgagggtaaatattcgcgccagtgccggcctgttcccctcaccctaaccctctccccaaaggggcgaggggactgtctgagcacttttgtactttgtcatctgactaaaaaggcgccgaagcgcctttagaaaatagtcgaatcagtgaattactggtattcgctaatcggtacgcaggagcagaacaggttacggtcgccgtaaacatcatccagacgtttcactgtcggccagtatttgtctgccacacctgccgggaataccgcaacttcacggctgtacggatgcgcccactcggcgaccagttcgctctgaatgtgcggcgcgttcaccagcgggttatcttccagcggccagacaccggctttcacctggtcaatttctgcgcggatagccagcatcgcgtcgataaagcgatccagttccactttgctttcagattcagtcggttcaaccatcagcgtacccgccaccgggaagctcatcgtcggcgcgtggaaaccgtagtcgatcaggcgcttggcaatatccagctcgctgatgccggtttcttctttcagcgggcgaatatcgagaatacattcgtgcgccacgcgaccgtcgcgaccggtatacagcaccgggaaggcatcctgcaggcggctggcaatatagttggcgttgaggattgccacctggcttgcttttttcagcccttctgcgcccatcatgcggatgtacatccagctgattggcaggatagaggcgctaccgaacggtgccgcagaaaccgcgccctgacgggttaacatgccttcgatttgcaccacgctatgacccggtacaaacggtgccaaatgcgctttcacgccgatcggtcccatacccggaccaccaccgccgtgcggaatgcagaaagttttatgtaggttaaggtgactaacgtccgcaccaataaagcccgggctggtgatgccaacctgggcgttcatgttcgcgccatcaaggtaaacctgaccgccgaactgatgcacgacttcacacacttcacggatcgtttcttcatacacgccgtgggtagaaggataagtcaccatgatacaggagaggttatcgcccgcctgttccgctttcgcgcgcagatcagtcagatcgatgttgccgtttttatcacacgccacaaccaccacctgcattcctgccatatgtgcagaagcggggttagttccgtgcgcagaagccgggatcaggcagatatcgcgatgcccttcgttgcggctttcatgataatgacgaatcgccagcaggcccgcgtattcgccctgtgcgccagagttcggctgcatacaaacggcgtcgtaaccggtcagtttcaccagccagtcagccagctgcgcaatcatctgctgataaccttcggcctgctccggcgggcagaacgggtgcagttcggcaaattccggccaggtgattgggatcatctcggcggcggcgttcagtttcatggtgcaggaacccagcgggatcatcgcctgattcagcgccagatctttacgctccaggctgtgcatatagcgcatcatttcggtttcgctgtggtagcgattaaacaccggatgggtgaggatttcgtcgtcgcgcagcatcgcaggctggatagagcggctgtcgtgagccacgtctttgtccagcgtgtcgatgtccaggccgtggttatcgcccagcagcacgttgaaaagctgcattacgttttcacgcgtggttgtttcatcaagggtgatcccaaccgcgttcagaatatcgctacgcaggttgatttcagccgcttcggcacgcgtcagtacgcccgctttgtcggccacttccacacacaaggtgtcgaaatagtgcgcatggcgcagtttcagacctttttgttgcaggcccgccgccaggatatcggtcagacggtgaatgcggttagcgatacgtttcaggccaaccgggccgtgataaacggcatacaggctggcgatgtttgccagcagtacctgggaagtacaaatgttggagttcgctttctcacggcggatatgttgctcgcgagtctgcatcgccatgcgcagcgcggtattgccagctgcatctttgcttacaccgataatacggcccggcatactgcgtttgtattcatctttcgccgcaaagaatgccgcgtgtgggccaccgtagcccatcggcacgccgaagcgttgcgcgctaccaaaaacaatatccgcgccctgtttacccggcgcagttaacagcaccagcgccataatatcggcggcaacgctgaccacaattttgcgacttttcagttcgctaataagcgcagtgtagtcgtgaatttcaccggtagtgcctacctgctgtaacagcacgccgaagacgtcctgatggtcgagcactttttgcgcgtcatcgacaatcacttcaaaaccaaaggtttcggcacgagtacggaccacatccagcgtttgcggatgcacatcggaagccacgaagaagcggttggcatttttcagtttgctgacgcgtttcgccatcgccattgcttcggcggcagcggtggcctcgtccagaagagaagcagaggccatatccagtccagtcaaatccagcgttacctgctggaagttgagcagtgcttcaaggcggccctgggagacttcaggttgatacggagtgtacgcggtataccagcccggattttccagcatgttacgcaggataaccggcggtagctgcacggcggtgtaacccatgccgatgtaagacgtgaagcgtttattgcgactggcaatagccttgagttctgccagtgcggcgtattcggtcgccggtgcgccaacctgcggtggtgtcgcaagttgaatatctttcggcacaatctggccggtcagcgcgtttaagctttgtgcaccaacggcattcagcatttcttgctgttgcgcggcgtccggtccgatatggcgttcaataaaagcgccgctgttttcaagctggcttaacgtctgtgtcatgagcgatggttcctgaaacgtgcagtgaattgtgaacctctctccttacgaagagagtgagggtgaggcataaattttcctcaccctgatcctctcccgcagaagaggaataaagccgttactcgtcttctaacaatgcttcgtatgcggtcgcatccagcagactttccagttcgctttcatcgctggctttgattttaaagatccagccgcctgcatacggttcgctgttcaccagttccggggaatcgctcagtgcgtcgtttaccgccacgatttcaccgcttactggcgcataaatgtcactcgccgcttttacgctttcggcaaccgcgcagtcatcgcccgcgctaaccgttgcgcccacttccggcaggtcaacaaacaccatatcgcctaacagctcctgagcatgttcggtaataccaacggtgtaagtgccgtcggcttctttacgcagccattcgtgttctttgctgtatttcagttctgctggtacgttgctcatcaatcaatctccaaaaaagtaaatcacgcgacggctttgccgttacgcacaaaaacaggttttgtcactttaaccggcatttcacggttgcgaatttgcacaatcgccgtttcgccaataccttccggcacgcgcgccagcgcaatgctgtaacccagcgtcggggagaaagtaccgctggtgataatgccttcatgctggttgccctgcgcatcggtaaagcgtaccggcagttcattacgcagcacgcctttttcggtcatcaccagaccaaccagtttttctgtaccatgctcacgctgcacttccagggcttcacgaccgataaagtcacgatctgccggttcccaggcgatggtccagcccatgttggcggctaaaggagagatggtttcgtccatctcctgaccataaagattcatgcccgcttccagacgcagcgtgtcacgcgcgcccaagccacatggcttaacacccgcttccaccagcgcacgccagaaatcggccgctttttcattgggcagcgcaatttcatagcccgcttcaccggtataaccagtggtggcaataaacagatcgcccgcctgcacgccaaagaacggtttcatcccttccaccgcctgacgctgggcgtcattaaacagtgtggcagcttttgcctgcgcattcggcccttgcacggcaatcatggaaaggtcatcacgaacggtaatttcgatgccgaaaggttcagcgtgttgggtaatccaggagaggtctttttcgcgggtggcggagttaacaacgaggcggaagaaatcttcagtaaagtagtagacgatgaggtcatctatcacaccgccagaggcattcaacatcccgctgtaaagggctttgccgcttttggtgagcttcgccacatcgttcgccagcagataacgcagaaactcccgggtgcggctgccgcgaagatcgacgatggtcatatgactcacatcaaacattccggcatcggtacgtaccgcatgatgttcgtcgatttggctaccgtaatgcagcggcatcatccagccgtggaaatccaccatgcgagcgccgcaaagcgtgtgttgttcgtacaaaggagtctgttgtgccatcttgtcctcattgaataagcggggctgacaactttttcatggtgaaattatcaccacgaaacccagcatcggagccactcccggtccccaacgcaatcgttctcttttgcctgaacttaccaccgaaacagactgttaaccataaggtaaaattgatcatcacattagcttatggttaaaaaatgcaaaaatcgcgacagaataaaaaaccaaaaaatacaccagtttctatacaaagatgatgtgatgagaaagtcaatttgaataagacaatattaagagctaaaaaaatgtcaaaaaacactaaatcaaaaaataatggcattagaaaatataatgcgaaaacggaggtgaaattagtttatttcaaatgaggaaaatctcccggcgaaaaaaccgggagatgaaagtgtgatgggtatcaaataaacaacagaggagaaatttttaacgcagccattcaggcaaatcgtttaatcccattgcctggcggataagttgcggcttaacgccaggaagcgtgtcggccagtttcaaaccaatatcacgcagcagttttttcgccggattggtaccggaaaacagatcgcggaatccctgcataccagccagcatcaacgccgcactgtgcttgcggctacgctcatagcgacgcagataaatgtactgcccgatgtctttcccctgacgatgcaaccgtttcagttcggcaatcagctctgcagcatccataaagccgagatttaccccctgccccgccagcgggtgaatggtatgtgcggcgtcgcccaccagcgccagacggtggctggcaaactggcgcgcataacgccccgtcagtgggaacacctgacgcgcgctctcaaccttgcataagcccaggcgattatcaaaagcgatatttaacgcgcgattaaattcgtcttcacttgcctgctgcatccgctgcgcttcctctgggctcagactccagacaatgctgcaaagatgcggatcgctaagcggtaaaaaggccagaatgccttcgccatggaaaacctgccgcgccaccgcatcatgcggttcttccgtgcgaatggtcgctaccagcgcgtgatgctgataatcccagaaagtcagcggaatatcggctttgttgcgcaaccaggaattagcgccgtccgcgccaatcaccagacgcgccgttaacatgctgccatctttcagcgtcaggaaggtttcattttctccccaggcgacctgctgtaattctgcgggggctaacagagtgatatcactgctctgatgcgctttgttccacagcgcgtagtgaatcacactattttcaacgatatgcccaagatggctatagcccatgctttgatcgtcaaagctaatgtgaccaaagctgtctttgtcccacacttccataccgtgataacagctggccctacgagagagaatgtcctgccagacgccaagacgggtgagtaatttttcgctggcggcattgatagcgctaacgcgcagttgtggtggtgcattcgccgccagaggttcctgtacgcgctgctccagtacggcaacgcgtaagccgctcccctgtaagccacaggcaaccgccagccccaccatgccgccgccaacaatggctacatcaacactttgcattgtttattccttaaaaccgccttcaacgcgccacccaaccgagggtgcgctgcgccagcacatcgcgtgccggggtgaataattccatcgtcatcagcccgatgttgcgcccgacaaccagcggtgcccaacggttggcaaaaagatgtacaaggctgtccgtgacgccaatggttgcttcgcgatcgctctgtcgacgctgctgataacggcacaatacgccgtaatcccccatgtcttctccgcgctcctgcgcctgagtcagggtttccgcaagactcatcacatctcgcataccgaggttaaacccttgcccggcaatcgggtgcagagtttgcgccgcattgcccaccagcacggtacgatgggtaatagatctggcggcgtgggttaacgccagcggataagcactgcgtttaccagcgtgggtaattttcccaagtcgccagccaaaggcgctctggagttcacggcaaaacttctcgtcactccagctcaacacctcttcgcgccgttccagtggatgacaccagaccaggctacagcgtccgtcagacatcggcaacatcgccagcgggccatgttgcgtaaagcgttcaaaagcgcgcccttcatgcgcaacggaagtagcaacgttggcaatcacggccagttgttcgtaaggctcctgctgccagtcaacgccgcacgcggtggctaacgcactatgggtgccatcagctgctaccagcacgcggcccgtcagcgtctcgccactctccagcgtcacttcaacgtgactctgagtacgggcaacgttagccacgcgatcagggcaatgcagcgttacgccaggtgctttacgcagcaatgcaaacagccgttgcccgacattgtgcaattcgacaacctgtcccagcgccgccagttggtaatcttctgcggcgagggtgacaaatccagcgtgaccacgatcgctgacatgcacggtggtgatggcagttgcgcaatccgccagagattgccagacgccgatgcgcgccagttgctgacaggtacccgccgccagcgctatcgctcgtccatcaaagcccggatgagcatgactctctggcgcagtcgcttcaatcaaatgtaccggcagcgccccgtgacttaaccgggaaatagccagcgccagcgtcgcgcccgccatgccgccaccgacgatgattacgctcattgctttctcgcagcaaccatcaacgcttcgatttcttccggctttttcaccacgctggcggtgaggttttcgttaccggtttcggtaatcacaatgtcgtcttcaatacgaatgccgataccgcgatattgttctggcacttctgcatccggcgcaatatacagccctggctctacggtcagtaccatgcccggttccagaatgcggctgcgatcctgaccataaacacccacgtcatggacatccagtcctaaccagtggctaaggccatgcataaagaaaggacgatgggcgttctgagcgatcagttcatcaacatcacctttcaggatgccgagttttaccaggccgctaaccatgatgcgcaccacttcaccagtgacttccagaatggaagttcccggacgatacaggcgcaggctggtttcgagagactccagcacaatgtcgtagatttcacgctgggcctgggtgaatttgccgttgaccgggaaggtgcgggtaatatcgccagcgtaacctttgtattcacaacccgcgtcaatcaacaccaggtcgccgtcgcgcatttcacactcgttttcggtgtagtgcagaatgcagccgttttcaccgctgccgacaatggtgttataggacggatagcgcgcaccgtggcggttaaattcgtggtgaatttcgccttccagatggtactcgaacattcccggacggcatttttccatcgcccgtgtatgtgccatggcggtgatttctcccgcgcggcggagtacggcaatctcttctgggcttttgaacaggcgcatttcatgaacaacaggacgccagtcgatcatcgttgccggtgcggtgagattttgccggctacctttacgcagtttttccagcgcactgttcacgattacatcagcatatgcatattcgccctgggcatggtaaaccacatccaggccgttaagtagttgataaagttgctgattgatttcgctgaatgccagtgcgcggtcaacgcccagtttctctggcgcggcatcctggcctaagcgacggccaaaccagatctccgccgtcaggtcgcgaacgcggttaaacagaacgctgtggttatgagtgtcatcgcttttaatcagcaccagcaccgcttccggttcgttaaagccggtgaagtaccagaagtcactgttctgacgataggggtattcgctgtcggcgctacgtgttacttctggtgcagcaaaaatcagcgcggcgctgccgggttgcatttgctccaccagggcctgacggcgacgctgaaactcttgccgggatatctcactcataacactctccttacgttttttgtttttagtgtagagtcggtttttgtacttctggcgcggtcggttgcggatgagtaaaggtgtcgtggcataacagcgcggcaacacgaacgtattcgatgatctcttcaaggctcatttcaagctcttcctgatcttcgtcttcgtcgtaacccagttgcgcaatgttacgcagatcgtcgatagcttcaccggtttcgccggtcactttatccagcttcggttgcgtaacgccaagaccaagcaggaagtgattgacccaacctgccaatgcatcagcccgatcgaaaacgctgacatcatcgccatcaggcagataaagctgaaaaaggaagccgtcatcctgcagggcatcgctggtggcagagtgcattttacgcagtgcctgtgccagctcatgaccgaaagccatgccttcgttcgtcaggtcgtgaagtagcggtagccaactgctgtcatcgttaccgccacatatcatcccgctgattaaaccatgcatctcagctggggtcagacccgtcccttgttggttcagatactggttcatttcgttgtaaccaggcatttcgttctgtatagacataagcattcgtcgtcaaagggaggaatattcatgatatgctaccactttgggccctggtggaccagaaaagggcttgtctcttctcatcagggtagctatagtgtcgccccttcgcagaccatgggtctaaagacgaaggcagcgcagtcaatcagcaggaaggtggcatgtctgcacaacccgtcgatatccaaatttttggccgtagtctgcgtgtgaactgcccgcctgaccaaagggatgcgttgaatcaggcagcggacgatctgaaccaacggttgcaagatctgaaagaacgcactagagtcacaaatactgaacagttggtcttcattgccgcattgaatatcagctatgagttagcgcaagaaaaagcaaagactcgtgactacgcggcaagtatggaacagcgtattcggatgctgcagcagaccatagaacaagcgttacttgaacaaggtcgcatcaccgaaaaaactaaccaaaactttgaatgacacttttcggtttactgtggtagagtaaccgtgaagacaaaatttctctgagatgttcgcaagcgggccagtcccctgagccgatatttcataccacaagaatgtggcgctccgcggttggtgagcatgctcggtccgtccgagaagccttaaaactgcgacgacacattcaccttgaaccaagggttcaagggttacagcctgcggcggcatctcggagattcccttcttatctggcaccagccatgacgcaactaccagaactcccactgacattatcccgacaagaaatccgcaaaatgattcggcaacgtcgtcgtgcgttaacgccggaacaacagcaggaaatgggtcaacaagccgctacccggatgatgacttatcccccggtggtgatggcacatacggtcgctgtattcctctcttttgatggcgaactcgacacccagccactcatagaacaactctggcgcgccggtaagcgcgtatatcttccagttttgcatccctttagtgccggtaatttgctgttcctgaattaccatccgcaaagcgaactggtgatgaacaggttgaagatccatgagccaaaattggatgtgcgtgacgtgctacccctttcccgattagacgtgctgatcacaccgctggtcgcctttgatgagtacggtcagcgcctgggaatgggcggtggtttttatgatcggaccttacaaaactggcagcactataaaacgcaaccggtgggttatgcgcatgattgtcagttggtggaaaaactccccgttgaagagtgggatatccctcttcctgcggtggttacaccgagcaaagtctgggagtggtaagggcgatacacccgcatcgccctgattgacatcgttgattctttgacctaatttagtgagtaagggtaagggaggattgctcctcccctgagactgactgttaataagcgctgaaacttatgagtaacagtacaatcagtatgatgacaagtcgcatcataacccttctccttcaagccctcgcttcggtgagggctttaccgttacagccccatgctgccctgccatcgtaaatccccattaaataaacacaacgcattgatctgactttgatttattttctggagcagactcgcaaagtagaatgcgcaacgcggcaacggtgtggagaagggataaaaaaacgggcaagtcagtgacctgcccgttgattttcagagaaggggaattagtacagcagacgggcgcgaatggtacccggaatagctttcattgcctgcagcgctttttcggcaacgtcttcgtcggcttcaatatcaataaccacataacccatctgggcggaagtttgcagatattgcgcggcgatgttgacgccctgctcggcgaagattttgttcagcgcagttagcacgcccggacggttttcgtggatgtgcatcagacgacgcccaccgtgcagtggcaggctgacttccgggaagttcaccgcagagagcgtactgccattgtcagaatacttgatcaatttacccgcaacttccaggccgatattctcctgcgcttcctgagtgctaccgccaatgtgtggcgtcagaaggacgttgtcgaattcacacagcggagaggtaaatggatcgctattggtcgccggttccgtcgggaatacgtcgattgccgcccccgccagatgtttgctcgccagcgcatcacacagcgccggaatatccaccacagtaccgcggctagcattaatcagcaggctgccgggcttcattagactaatttctttcgcgcccatcatatttttggtggacggattctctggtacatgcagactcaccacatcgctcatattcagcaggtcagaaagatgctgtacctgagtggcgttgcccagcggcagtttattttcaatatcataaaagtaaacatacattcccaggctttcagccagaatgcccaattgcgtaccaatatgaccgtagccgatgatacccagctttttgccgcgcgcttcaaaagaacccgccgccagtttgttccacacgccacggtgcgctttagcattggcttccggcacgccgcgcaatagcagcagcagttcgccaatcaccagctccgcaacagagcgcgtattactgaacggtgcgttaaataccgggatcccgcgctttgccgccgcatccagatcaacctggtttgttccgatacagaaacagccaatagcgaccagtttttctgcggcgttgatcacgtcttcagtcagatgggtacgggatcgcaggccgatgaagtgggcatcgcggatggattcttttaattgttcatcatccagcgcgcctttgtgaaattcgatgttggtgtaaccagctgcacgaaggctttccagcgccttttggtgcacgccttctaccagcagaaacttaatcttgtctttctccaggcttacctttgccatttacccaatcctgtcttttgaaatgttgtgtgcggatttgcatccgcctttcaacatatcaaaaaataatattgcggcaatatgaacgtttgcgtcgcgatgttgaggaaatatcacgcaaaggtaattcttggatgaatatgctggtttagaggatttatttagagcaatcgacaattgcctggtaaaagcgtgacacatgtcaccaaatttaatgaagagaatttttttaacgggggaggttcccccgtcagatcatttcacaatggttttgacaccgtcaggtgtgccaatcagcgcaacgtccgcgccacggttagcaaacaagccaacagtcaccacgccaggaatcgcatttatggcgttttccatcgctatcgggtcaaggatttccatgccgtggacgtcgaggatcacgttgccattatcggtcaccacgccctgacggtattccggacgaccgcccagtttcaccagctgacgcgccactgcactacgtgccatcgggataacttctactggcagcgggaatttacccagaatatcaacctgcttggaagcgtctgcaatacagataaatttttctgcaacgctagcaatgattttttcacgggtcagcgccgcgccgccgcctttgatcatttgcatgtggccgttgatttcatctgcgccatcaacgtagatgccaaggctgtcgacttcgttgagatcaaaaacgtgaatgccgaggcttttcagtttttcagtggaagcatcactactggaaacggccccttcaatctggcctttcattgtaccgagcgcgtcaataaagtgtgcggcggtggaacctgtacctacaccaacaatggtgccgggctgaacatactgaagtgccgcccatcctactgcttttttcaattcatcctgcgtcatgatcgtttcgcctgtggtatgaaatttcacacgcattatatacaaaaaaagcgattcagaccccgttggcaagccgcgtggttaactcatccataaaatatcgcgcaatggcaggcatcccctttcgccccgcaaataaagcatacaacggtctgggtatgccgctccacggtgcaaacaggcgcaccagttcaccgttcgcaagcccctgtttacaggcaaattgaggcaataacgccacgccattcaacacaaccagggcgcgaactcgctgagcgaaatgcattagcgcaaatccctgatcttttaagctgcgcttttaaccacggatacaaatgttacccgccgacggcttcggtatatgcaacctgacacaaaattgtgtcatagtgcaggaaaaagcatttaccaggagcagacaacagcaatgaaacgcccggactacagaacattacaggcactggatgcggtgatacgtgaacgaggatttgagcgcgcggcacaaaagctgtgcattacacaaagtgccgtcagtcagcgcattaagcaactggaaaatatgttcgggcagccgctgttggtgcgtaccgtaccgccgcgcccgacggaacaagggcaaaaactgctggcactgctgcgccaggtggagttgctggaagaagagtggctgggcgatgaacaaaccggtagcactccgctgctgcttagtctggcggtcaacgccgacagtctggcgacgtggttgcttcctgcactggctcctgtgttggctgatagccctatccgcctcaacttgcaggtagaagatgaaacccgcactcaggaacgtctgcgccgcggcgaagtggtcggcgcggtgagtattcaacatcaggcgctgccgagttgtcttgtcgataaacttggtgcgctcgactatctgttcgtcagcagtaaaccctttgccgaaaaatatttccctaacggcgtaacgcgtagcgcattactgaaagcgccagtggtcgcgtttgaccatcttgacgatatgcaccaggcctttttgcagcaaaacttcgatctgcctccaggcagcgtgccctgccatatcgttaattctagtgaagcgttcgtacaacttgctcgccagggcaccacctgctgtatgatcccgcacctgcaaatcgagaaagagctggccagcggtgaactgattgacttaacgcctgggctatttcaacgacggatgctctactggcaccgctttgctcctgaaagccgcatgatgcgtaaagtcactgatgcgttactcgattatggtcacaaagtccttcgtcaggattaatccatcaaataatgcctgatagcacatatcaggcgttgtcctcacttctttttgtattccttgaatcacatcacaaaatagacaaatctcaggcggcaaaaaacgacgtctgaatgcattttttttgctggcgacaaacccacgtaaaaagctcaccgtaggcgcaaataccctcattttgattgcgttttacggagcaaataatgtctaacgtgcaggagtggcaacagcttgccaacaaggaattgagccgtcgggagaaaactgtcgacagcctggttcatcaaaccgcggaagggatcgccatcaagccgctgtataccgaagccgatctcgataatctggaggtgacaggtacccttcctggtttgccgccctacgttcgtggcccgcgtgccactatgtataccgcccaaccgtggaccatccgtcagtatgctggttttagtacagcaaaagagtccaacgctttttatcgccgtaacctggccgccgggcaaaaaggtctttccgttgcgtttgaccttgccacccaccgtggctacgactccgataacccgcgcgtggcgggcgacgtcggcaaagcgggcgtcgctatcgacaccgtggaagatatgaaagtcctgttcgaccagatcccgctggataaaatgagcgttagcatgaccatgaatggcgcagtgctaccagtactggcgttttatatcgtcgccgcagaagagcaaggtgttacacctgataaactgaccggcaccattcaaaacgatattctcaaagagtacctctgccgcaacacctatatttacccaccaaaaccgagtatgcgcattatcgccgacatcatcgcctggtgttccggcaacatgccgcgatttaataccatcagtatcagcggttaccacatgggtgaagcgggtgccaactgcgtgcagcaggtagcatttacgctcgctgatgggattgagtacatcaaagcagcaatctctgccggactgaaaattgatgacttcgctcctcgcctgagcttcttcttcggcatcggcatggatctgtttatgaacgtcgccatgttgcgtgcggcacgttatttatggagcgaagcggtcagtggatttggcgcacaggacccgaaaagtctggcgctgcgtacccactgccagaccagtggctggagcctgactgaacaggatccgtataacaacgttatccgcaccaccattgaagcgctggctgcgacgctgggcggtactcagagtctgcataccaacgcctttgacgaagcgcttggtttgcctaccgatttcagtgcacgcattgcccgcaacacccagatcatcatccaggaagaaagtgaactctgccgcaccgtcgatccactggccggatcctattacattgagagcctgaccgatcaaatcgtcaaacaagccagagctattatccaacagatcgacgaagccggtggcatggcgaaagcgatcgaagcaggtctgccaaaacgaatgatcgaagaggccagtgcgcgcgaacagagcctgatcgaccagggcaagcgtgtcatcgttggtgtcaacaagtacaaactggatcacgaagacgaaaccgatgtacttgagatcgacaacgtgatggtgcgtaacgagcaaattgctagcctggaacgcattcgcgccacccgtgatgatgccgccgtaaccgccgcgttgaacgccctgactcacgccgcacagcataacgaaaacctgctggctgccgctgttaatgccgctcgcgttcgcgccaccctgggtgaaatttccgatgcgctggaagtcgctttcgaccgttatctggtgccaagccagtgtgttaccggcgtgattgcgcaaagctatcatcagtctgagaaaagcgcctccgagttcgatgccattgttgcgcaaacggagcagttccttgccgacaatggtcgtcgcccgcgcattctgatcgctaagatgggccaggatggacacgatcgcggcgcgaaagtgatcgccagcgcctattccgatctcggtttcgacgtagatttaagcccgatgttctctacacctgaagagatcgcccgcctggccgtagaaaacgacgttcacgtagtgggcgcatccagtctggctgccggtcataaaacgctgatcccggaactggtcgaagcgctgaaaaaatggggacgcgaagatatctgcgtggtcgcgggtggcgtcattccgccgcaggattacgccttcctgcaagagcgcggcgtggcggcgatttatggtccaggtacacctatgctcgacagtgtgcgcgacgtactgaatctgataagccagcatcatgattaatgaagccacgctggcagaaagtattcgccgcttacgtcagggtgagcgtgccacactcgcccaggccatgacgctggtggaaagccgtcacccgcgtcatcaggcactaagtacgcagctgcttgatgccattatgccgtactgcggtaacaccctgcgactgggcgttaccggcacccccggcgcggggaaaagtacctttcttgaggcctttggcatgttgttgattcgagagggattaaaggtcgcggttattgcggtcgatcccagcagcccggtcactggcggtagcattctcggggataaaacccgcatgaatgacctggcgcgtgccgaagcggcgtttattcgcccggtaccatcctccggtcatctgggcggtgccagtcagcgagcgcgggaattaatgctgttatgcgaagcagcgggttatgacgtagtgattgtcgaaacggttggcgtcgggcagagcgaaacagaagtcgcccgcatggtggactgttttatcagcttgcaaattgccggtggcggcgatgatctgcagggcattaaaaaagggctgatggaagtggctgatctgatcgttatcaacaaagacgatggcgataaccataccaatgtcgccattgcccggcatatgtacgagagtgccctgcatattctgcgacgtaaatacgacgaatggcagccacgggttctgacttgtagcgcactggaaaaacgtggaatcgatgagatctggcacgccatcatcgacttcaaaaccgcgctaactgccagtggtcgtttacaacaagtgcggcaacaacaaagcgtggaatggctgcgtaagcagaccgaagaagaagtactgaatcacctgttcgcgaatgaagatttcgatcgctattaccgccagacgcttttagcggtcaaaaacaatacgctcagtccgcgcaccggcctgcggcagctcagtgaatttatccagacgcaatattttgattaaaggaatttttatgtcttatcagtatgttaacgttgtcactatcaacaaagtggcggtcattgagtttaactatggccgaaaacttaatgccttaagtaaagtctttattgatgatcttatgcaggcgttaagcgatctcaaccggccggaaattcgctgtatcattttgcgcgcaccgagtggatccaaagtcttctccgcaggtcacgatattcacgaactgccgtctggcggtcgcgatccgctctcctatgatgatccattgcgtcaaatcacccgcatgatccaaaaattcccgaaaccgatcattagcatggtggaaggtagtgtttggggtggcgcatttgaaatgatcatgagttccgatctgatcatcgccgccagtaccagtaccttcagtatgacgcctgtaaacctcggcgtcccgtataacctggtcggcattcacaacctgacccgcgacgcgggcttccacattgtcaaagagctgatttttaccgctagcccaatcaccgcccagcgcgcgctggctgtcggcatcctcaaccatgttgtggaagtggaagaactggaagatttcaccttacaaatggcgcaccacatctctgagaaagcgccgttagccattgccgttatcaaagaagagctgcgtgtactgggcgaagcacacaccatgaactccgatgaatttgaacgtattcaggggatgcgccgcgcggtgtatgacagcgaagattaccaggaagggatgaacgctttcctcgaaaaacgtaaacctaatttcgttggtcattaatccctgcgaacgaaggagtaaaaatggaaactcagtggacaaggatgaccgccaatgaagcggcagaaattatccagcataacgacatggtggcatttagcggctttaccccggcgggtagcccgaaagccctacccaccgcgattgcccgcagagctaacgaacagcatgaggccaaaaagccgtatcaaattcgccttctgacgggtgcgagtatcagcgccgccgctgacgatgtactttctgacgccgatgctgtttcctggcgtgcgccatatcaaacaagctccggtttacgtaaaaagatcaatcagggcgcggtgagtttcgttgacctgcatttgagcgaagtggcgcaaatggtcaattacggtttcttcggcgacattgatgttgccgtcattgaagcaagcgcactggcaccggatggtcgagtctggttaaccagcgggatcggtaatgcgccgacctggctgctgcgggcgaagaaagtgatcattgaactcaatcactatcacgatccgcgcgttgcagaactggcggatattgtgattcctggcgcgccaccgcggcgcaatagcgtgagcatcttccatgcaatggatcgcgtcggtacccgctatgtgcaaatcgatccgaaaaagattgtcgccgtcgtggaaaccaacttgcccgacgccggtaatatgctggataagcaaaatcccatgtgccagcagattgccgataacgtggtcacgttcttattgcaggaaatggcgcatgggcgtattccgccggaatttctgccgctgcaaagtggcgtgggcaatatcaataatgcggtaatggcgcgtctgggggaaaacccggtaattcctccgtttatgatgtatagcgaagtgctacaggaaagcgtggtgcatttactggaaaccggcaaaatcagcggggccagcgcctccagcctgacaatcagcgccgattccctgcgcaagatttacgacaatatggattactttgccagccgcattgtgttgcgtccgcaggagatttccaataacccggaaatcatccgtcgtctgggcgtcatcgctctgaacgtcggcctggagtttgatatttacgggcatgccaacagtacacacgtagccggggtcgatctgatgaacggcatcggcggcagcggtgattttgaacgcaacgcgtatctgagcatctttatggccccgagcattgctaaagaaggcaagatcagtaccgtcgtgccaatgtgcagccatgttgatcacagcgaacacagcgtcaaagtgatcatcaccgaacaagggatcgccgatctgcgcggtctttccccgcttcaacgcgcccgcactatcattgataattgtgcacatcctatgtatcgggattatctgcatcgctatctggaaaatgcgcctggcggacatattcaccacgatcttagccacgtcttcgacttacaccgtaatttaattgcaaccggcagcatgctgggttaatgactcgtcccgtcacgatcttcagcaatatgctgaagcatcgtggcggtataacgatgatttctgatactataaagatattcctgcatatacatcggcctgtgcggtgcatcaaaatatttcagcgttgccggattcaccagtcgccaggcaaaatgcgggatcaccgtcagaaaatgtccgcgctccacggcgctgattttggccataaaactgtagggacgataaataatggttggattgatcccacaaggtcgcatattcgcatcaatcattgcttcgaagttggcccggttctgaaagcgcatttgtagccagggcagctcctgaagcagctcttgctcttgtcgctcttcataacggcgagaaacgagaaagcctaatcgcagcggtggtagttcactgatagtcaggttttccagttcctgaactcgtgcagatacatgctgtggggagataataaaatctaactggcggtcaaaaagattatcgataacgccattttcgctgaactcaactggctgggcggtcacgccttcatacttatctccgagactaatcaactgatcgaaaataattgtcggataagtattatctatgccaatcacaatttctcgactacgacgcccactgttatggatttcattatcaatcgcagaaagccgttgataaaccgggaacagtttttgatacagttcctgtccggctttattgaggctgatattattatctttgcgggtaaatagcgtatagccaatttgttcttccagcgcggcaatgcttttaccaaatgggctagccgtcatatggattttttctgccgcccgggcaatattattggtttgcgctaataaaatgaaattgcgcatctttttgctaataaaaatgtccatccccctcccccgcatccttgtccgcttaaccgtttcagtcagcctatccttgatgaaaccgcgagcaaagataggtgattacgtcatggttttacagaaaattacagaaaaaggaggcaatatcgggtaaaggcattagcccgacgaatacgtcgggctacaaatattattgtgctgcaggtgttttagcgggttgttgatccacaggttctaactggaagaccacatcgacctgatcatcaaactgaatagcggcctgctcgtaagtttcctgggcggacaccggcgcggcatcggctttcatcatccgcaccattgggctgggctgatagttggaaacatggtagcgcacgctatataccggccccagtttacgatgaaagccgttcgccagttcctgcgcctgatgaatcgcgttatcaatcgctgccttacgcgctttgtctttataggcatccggctgcgccacgcccaggctcacagaacgaatttcgttaagacccgccttcagcgcgccatccagcaaggaattcagtttgtctaactgacggagcgtgacttccaccgttctcacagcgcggtagcctttaaggatacttttaccatcctgataatcataatctggctgggtgcgtaagttcgcactgctgatatcttttttcgcgatctgattgagttcaaggaaggaaatgtattgtgcgacgcgctcatctgcctgtttcttggcagtagcggcatccttcgcggccacgttaacttcaatcgcaagagtggcaatgtctggcaccgcatccacgcttgccgtaccggaggtgacaatatgcggtccatccggcaattcgttagcctgcgctgccatcccgctaatacccattaatgccgccagggcgataactttgaacttcacgttagtctctccgtgttaattgacttgcccaaaattcaggacctctggaggcaagcttagcgcctctgttttatttttccatcagatagcgcttaactgaacaaggcttgtgcatgagcaataccgtctctcgccagctgcaaggcaataaaccacataacacatcccacaaccagattgataatgcgctgtgcttttgccgtgcgcagacgcggtgccagccaggctgcgagaagagccagaccaaagaaccacaggaaagaggcgctaattgtcccgagtgcaaaccagcgttttggttccacatcaagttgcccgccaaggctgcccagtacaacaaaagtatccaggtaaacatgcggattcagccaggtcactgccaacatggtggcgataattttccatctgccttgcttcatgacttcggcgctggctaactcaatattactgctcattgctgttttaaaagcgccaaaaccataccacagcaagaaggctacgccgccccaggtgaccagcgccagcaaccacgggctctgcatcaataacgcgctgccaccaaaaatcccggcgcaaatcaggaccaaatcgctgatagcacaaagtaaggcaatcataatgtggtactgacgacgtatgccctgattcatcacaaaagcattttgtggaccgagcggtaggatcatagccgccccaagtgcaagaccttgaaagtaataagaaaacacgttggatattccgaattaagtatctgatgcagagactatatcgcgggattgttattagcggaaattgataatattaattggcaatcagaaaaactaataagagagaggccagagagtattatctggcctcagcgttgattacgcagctttgtcttctttcacccgcttaaagttcacatccatttgcgggtacgggaagctgataccggcggcatcaaattcacgtttaatacgctccagcacatcccagtacacgttttgcagatcgccgctgttgctccagacgcggaccacgaaattaatgctgcttgcaccaagttcgttcaggcgcacagtcatttcgcgatctttcaaaatgcgatcttcagactggataatattggtcaggatctgcttaacctgatcgatatcggaatcatacgccacgccaataataaattcgttacggcgaactggctcgcgggagaagttaataatatttccggcaataattttaccgttcggaataacgataattttaccgtctgcagtacgcatggtggtggagaaaatctgcacactcagcacagtaccggctacgccgcccaggtcaacatattctccggcacggaacgggcggaacatgacaagtaacacgccagcggccaggttagacagactcccctgcaaagccagaccaacagctaagcctgcggcaccgagtacagcaatgacactcgcggtttgtacacccacgcgtcccagtgcagcgattagcgtaaaggcgataataccgtaacggactaatgcagaaagaaaatcagcaacagtggcatcgattttacgggagatcatcaggcgattcaccgcgttggaaatcatccgcgcgataatcaaaccaacgatgatgatcgcgagtgccgccacgatgtttactgcataacttagcagcagcgcctggttagctaccagccagcttcccgcgccgtttatgctatcgacaacattcaaatcttccattcaatattccttttcaactgactcaaaatggagaaatacactccgccgccttatgacgggcagtctgacaagggtaaacaataaagcataattttgccaaatagatcacagatttctcatctgaatcaccttgcttttggcgaaaaaatccccgcagagcggggctcagacagatatcaatgtgcgctttgtcatgccggatgcggcgtgaacgccttatccggcctacaaaaacctgcaaattcaatatattgcaggatacgtgtaggcctgataagcgtagcgcatcaggcaattttgcttttggcgaaaaaaagacccgcagagcgggccttgagataagcagaaaggaatatcttacagaacgtcgatcgcgttcagttcctggaatgctttctccagacgagcgatcatgctagtctgaccggcacgcagccatacgcgcggatcgtagtatttcttgttcggctgatcttcgcctttcgggttacccagctgaccctgcagataagcttcgttcgctttgtagtagttcagaacgccttcccaggttgcccattgggtatcggtatcgatgttcatttttactacgccgtagcttacggagtctttgatttcctgagcagtagaaccggaaccaccgtggaatacgaagttcaggctgttgtgcggcaggttgtgtttcttggaaacatattcctgagaatcacgcaggatggtcggagtcagaaccacgttacccggcttgtaaacaccgtgtacgttaccgaaggacgctgcgatggtgaaacgcgggctgattttgctcagttcggtgtatgcgtaatcaacgtcttccggctgggtgtacagtgcagaagcgtccatgtggctgttgtccacgccgtcttcttcaccaccggtgcaacccagttcgatttccagagtcatgccgattttggacatgcgctccaggtatttagagcagatttcgatgttctcttgcagagattcttcagacaggtcgatcatgtgagaagagaacagcggcttaccggtagctgcgaagtgtttttcacccgcgtccaacagaccgtcgatccacggcagcagtttcttcgcgcagtggtcagtgtgcaggataaccggaacaccataatgttcagccatctggtgaacgtgatgcgcaccagagatcgcgcccaggatagcagcaccctgcggaacgtcagatttcacgcctttaccagcgataaaggaagcaccaccgttggagaactgaacgataaccggcgctttaactttagcagcggtttccagtacggcgttgatggagtcagtaccgacgcagtttactgctggcagtgcgaagttgttttcttttgctacctggaaaactttctgtacgtcatcaccagtgattacgccaggttttacgaaatcaaaaatcttagacatgtctcttgtcctgtatcgtcgggccttatactcgtcatacttcaagttgcatgtgctgcgtctgcgttcgctcaccccagtcacttacttatgtaagctcctggggattcactctcttgtcgccttcctgcaactcgaattatttagagtatgaaaaattgcgtgctctaaaagcgcgctgaaacaagggcaggtttccctgccctgtgattttttacttcttagcgcgctcttcgagcatcgctactgcaggcagtactttaccttccacgaattcgaggaatgcgccgccgccagtggagatgtaggagattttgtcagcaatgccgaacaggtcgattgctgccagagtgtcgccgccgccagcgatggagaacgcttcgctgtctgcgatagcgttagccacgatttcagtacctttgcggaagttcgggaattcgaacacgccaaccggaccgttccacagaatggttttcgcattcttcaggatttcagccagttcctgagcggaagcatcaccgatatccaggatctgctcgtcagctttcacatcgttaacagatttcagggtagccggtgcagtttcagagaactcggttgctacgcgaacatcagacggaaccgggatgttgcaggtggtcagcagacgtttagcttcgtcaaccaggtcagcttcgtacagggatttacccacatcgtggccttgtgccgcgataaaggtgttagcgataccaccaccaacaatcagctggtcagcgattttagacagggagtccagaacggtcagtttggtagatactttagaaccaccaacgatagccaccatcgggcgagcaggttctttcagtgctttacccagcgcgtccagttcagctgccagcagcgggcctgcgcacgcaacgtcagcgaatttaccgataccgtgagtagaagcctgcgcgcggtgagcagtaccgaatgcgtccattacgaacacgtcacacagtgcagcgtattttttggacagggtttcgtcgtctttcttctcgcctttgttgaagcgaacgttttccagaacaaccagttcaccttcagcaacgtcaacgccgtcgaggtaatctttaaccagacgaaccgggttagacagtttgtctttcaggtagttaacaaccggcagcagagagaattcttcgttgtactcgccttcggtaggacgacccaggtgggaagttaccatcacttttgcgccttgtttcagggccagttcgatggtcggcagagaagcacggatacgcgcgtcgctggttactttcccgtcttttactggtacgttcagatccgcacggataaatacacgtttcccagcaagatccagatcggtcatcttaattacagacatggtgaatcctctcgttgattctaaaagttttgcagacgctgcttgcgtcttacctgaaagcaacagtagccatagctaacgtcgtgtcgagcattcggttagcaaagccccattcgttatcgcaccagaccaacgttttgatcaggtgtgcgccactgacccgggtttgggtgccatcgacaatggcactgtgcggatcgtggttaaaatctacagagaccaacggcaattccgtatagtcaactataccatgaaatgcaccttgtgctgctttttgcagcaacaggttgacttcattggcttttacaggtttcttcaccgtcacgcttaaatcgattgccgtcacatttatggttggcacacgtaccgcaatcgcttcaaagcgatcgttaaattgcggaaaaaatcgtgtgataccggcggccagtttagtatcgaccggaatgatgctctggctggctgcccgggtgcgacgcaggtcaggatggtatgcatcaataacctgttgatcgtgcatggcggagtgaattgtggtcacagtgccggactcaataccgtacgcatcatctaacaatttgatgacgggaattatgcaattcgtggtacaggaagcgttagaaacgatgcggtgttccgcacgaagttgatcctgattgacgccgtaaacaacggtcgcgtcgagatcgttactgccaggatgactaaagagcacttttttggccccggcggcaatatgcgcttcgccatgctcgcgggagccatatacgccggtgcagtcgaggactacatcaacgccaagttcacgccaggggaggctttgcagactacgttcatgcaatacgcggatggcgtcatcaccaacaaaaagttgatcgcgttcctgtcgtacttcccatgcaaaacggccatggctggtgtcatatttcaacaaatgcgccatgcccgcagcatccgccagttcgttgattgccaccacggtaatttccgcccggcgtccggattcatacaaagcacgaaccacattacgcccgatgcgaccgaagccatttatcgctacgcgtacggtcatagatctcctgcaaggttttccctgagcaaatttgccagacagagtaatccagcaaatcgtccggggaaaccttacctgtcgcaaactgcgactgattggttaattgtcgaacatttaatcgactgaaacgcttcagctaggataagcgaaacgtggaataaaaggaatgtttgtccagccgaagaagacatttatctgactcacatcacacttttatccccttttgtgggaagctttattccaggctggcgtaataataaccctacaataactggaataaattgtcagcttgtgaagtgataccggccttcttcagtcatctctactatcagattggcctgacggctattcatcagcacacgctcgacattggggccatcggtgcgggcataaaatgcttcggctacttgccgcgttaatcctcccgcaattttacgactaatcaagcgctcccgcagaatttgagcaggtgcatgaataaaaatagaaaaatcgcagaaagatgccaactccagccacttttcatcatccagtaacaaccagtttccttcgacgatgacgagtggtgcggtaacgtgcaacgcatcttcaacaggatcatgcttttgtcgatcgtactgcggccacgtacaatccccttccacgacctggcgcagattttccgtcagtttcgcaacgtcaaatgtctctggtgcgcctttgaaggggcgcaattgatgcgcatccagccagctattgtaatggtgaaaaccatccatcgggagcgtctgaatagcgggcagttccgggtcttgttgcgcgagatattcccagaaggtggttagggtacttttacccgtccccggcggagcgcaaagaaaaaccaccgtacgccgctgcggatttaccgtctgtaaggccgccaacatgtgcagcaacggtttatgtacattttcaatctcttcgttctggtactgtgcctgtatcttcagcccattcaccgttaattcaattttcacggcgttaattcctttaaggtggtcgttactgccagcgtcagcgccgttttgaccattccgctaaaacgcgcctcactccagacggagaaatcagcgaacttcatcgcttttaacgcgtcatagagcatcgcattgcgggttatgctattgacgttgctgataaaatcccaggtcatgtcatcggcaaatccgggcgtttcatcctgttcgttcaggtaatgccagaactgggaaaaatgcgtgatatcggcgtacaaccatttatccattttcccaacgcataaatcaaacgcagtgcaacatcaatatcgtcaagcgggccgctttgggcgagtaacggcttcactgcatattccacgatctcttcatcgttatcgacaaacaggctcggcagaaactggcgtatcccctggagcaaaatggtatgcgcagttttcataaaactaaataaattgtcctgtgcatccagttgctcaagcacatcatcttctgtcagcgtcgccattggtcttccgatagatcaccatcaatgcagggagtctattatattacacgtttggtccgcgccgccgatcagtaatgtctgcgtccgcaccccattcgccgtctgttggataccgttcaccagctcaccgcccgtcacgcccgtagcgctaaagaggatatcgttccccctcaccagttcatcgaggctgtacacacggttaacgtcaacgcccattgccttgcaacgcttgcgctcctgctctgcaatctgccgattttccgtgtaatcccctttagcctggcaaaagtcaatcagctcggcctgcatatccccgcctaatgctttaacggcacaggcagaaatcacgccttctggcgcaccgccgatggtgtacatcacatcgtaaggattatcctgccagcaggtcagcacgctggcggcgacatcgccatccggcagggcaaaaaccttcacgcccagctgtgttgcttcctcaatcgcggcactcaggcgcggtttatccagcgtaaccatgcgcagcttatccagcggtttgcctaacgctttcgccacgttgcgcaggttgtccgtcagaggcaaagacagatcaatcgcgcccgccgccagccgattaacaaccagctttttcatatacatatcgggcgcatgtaacaggctatctcgaggggcgaaagccatgaccgccagcgcattgctctgccccatcgccaccatccgcgtgccttcaatgggatcaaccgcgatatcgacttctggcccatcgcctttgcccacctcttcgccaatccacagcatcggcgcatggtcaatttctccttcgccgataaccactcgtccacgaaaagcgacgtcgtttaatgcctggcgcatcgcggtgaccgccaggccatcaattttatttttgtcgccacatccggtttgcggccaggcagccaacgctgcctgttccgtaacgcgaaataatggccacgccagggacatcattgcgcggcctccccgatatcaacgccaaattgtgccagcagatatttctcggcctgttcattccagatgccgtgcgtttcctcaaccagccgcgccaactctttaaacagcggatcggttttgcctttttcggcaaaatcggcaatggcagtgagcggcatggtcacgccgttataaatgagttttttaccgccagggatatccggcagattgagcacggtttctggcaccgcatccaggccaccgatatgggtcaccataaagctcggctgtaactgcccagtggcgctaagggcaatcgcctctttcatgtcgtccgtactaccgccagatgtaccgacgacgtgcgtgctgttgtaatggacgttgtagaaattaaacggcactttgaagtttttatccgtcggcccggcaaagaagttcagacagccatcttccgccagtaattcatcagccatctcaacgacagcaggcaccgccgcataaacaaaaatgtcatcgaacccggcatctcctgtcagcgcccgcagcatctggacaggatcgctcatccctttggtattcacatacaccagctcaatgcctttactggccgccagttccaccggcagcagcttctgtacctgcgccagacgtttgtcgtcgatatcgaccaccaccacccggctcggttgtatgccgccgttaatggcgtaatcgatagcgccaatgcccatcggacctgcacacgccagcagtgcaatattgccgccaggtttgacgcccatgcgatgctcataaacatattgcgtggtgtgataattggcatgataagcaccaataatgcagcacataggctctgccaggctcgccgcagcaaaataagagccgtgatacggtaatacgcagcccaaattaatggcgatttcgggaataatcatataagtggcattgccgccaaaatattcgtagctgtagcccgcactatatccgcttggtaaccccatcgccggttgcaatacaaaacgctggccttttttatatttgccagtgagatttttacccacttcgacaataaccccggcacattcatgcccggtaatgaccggatgattttctaaatcgtcgggtacgcgtttatgttcactaccgagtaacgccgctttccaggtgcttaaacagacgctgtcagaaattacactcaccagtaattcattatcggtaatttctggcagttcaaatacgcgcagacggacatcccgcttgccataaatagcagcaactttggttttcatttttacctctgtaatcagtgtttatgttcggcggttaattgattaaataaagtgtcgagttttggatcgccaatatagttattaatcaatatcagtggtttatccgtcacacgtttcacgcgcccttccagactggcatgagtaacgacgatatccgcatccgcaggcacgttttctatggcgtaatgttttacttcaattgccagccccgctttttccaggcgtttacggaaggtggtcgcgcccatcgcactggagcccatccccgcatcgcaaacaaaggcgatacgcttaaccctgcttaagctgaatgcaccctcttgtttcatcgccttaaccgcattggcactctgagcaaactcatcttcgctctccgtttccaccgttttttccatcttcagtatcaggctagtaatagcaaaggacaccagggtacctaccgtaacaccggcaattgtcgccaggaagctgcctttcggcgtcagtgccaggtaagcaaagatagaccccggacttgggccagccaccagaccaccgtccagtaagttaaacatccaggtgccagacataccgcccgcaatcatggcaataatggtcagcggcttcatcagcacatacgggaaatacagttcgtggatcccaccgaggaagtgaataatcatcgccccgggcgcagaacgtttactcatccctttaccaaacaaggtaaacgccagcagcagccccaggcccggacctgggttagaggccaccataaagaagatggatttaccgttaacgctagcctgttgcattcccagcggataatagacgccctgatcgatcgcattattgaggaaaagcactttcgccggttcattgatgacactcaacaatggcagataacccgcatgtaccagcgcctcaatacactctttgacgaaagtattggcaattaacaccgccgggccgataacttcaaaacccagcagacaaaggagcatccccgcgatacctaaactgaagttattgataaccatctcaaaaccggcaggtatgcgtttttccagtgccttatcgacatattttatgaccaacccaccgagcggccccatgatcatactgccaaggaacatcgggatctctgcgccaacgatcacaccaatagtacctattccgcccatgaccgccccgcgtttaccgccgaccagatgaccacctgtagaaccaatcatcacgggcaataaataggtaatcatcgggccgacaattttggcgaaatgttcgttaggcagccaaccggtgggaataaataacgcagtaataaaaccccaggcaataaaagcaccaatattggggatgaccattgcagtcaaaaagcccccaaaagcctggacctttgcacgagcagacttgttttccataatattatcctgtagaggagagagtaattatccgcggctgataatgtccgctaattgtttttcactacttgctgttaagagttgttcgagtatttcttcttcgcacagtaattcacttaacgcctgaatagcgccaatgtggctatcggcatcggcagcagagagtccgatgagtaatttaattggttcgtcattccccggaaaataaacaccttgttcaagtaatgtcaaagacatcccggttttaagcgccccacattccggtcgcgcatgaggcattgccacgcctggtgcgagaatataataagggccattgttaatggtggaatctttaattgcctgaatgtaattctcgctgatatagtttttatccagcaaacttaccatgctgaaatcgatagcttcctgccaatcttttgcactatgtataacactgatactactttctggaaaataatcactaagccgcataaattatccttattttatttttagggtaccgtccggcggtaaaaataaaatactcgtgcggtttaatgaaagcaattgagcagggaaaccggtgttttgaaaacagtgaattattaatttcttatataacattgagttatagatataacaacaaatgtcaatacgcatatcgtgatgcatattacataattgatatttattgcatataaatatttgtgatctacaacacgccttatctattgcttgtccgcaaacggacatatcaaggtaataaaaaaggtcgccgaagcgacctttttacccgaaatgctaattacagcagttcttttgctttcgcaacaacgttatcaacagtgaagccgaactcttcaaacagcagctctgccggagcagattcaccgaaggtggtcataccgacgatagcaccgttcaggccaacatacttgtaccagtagtcagcaatacccgcttctacagcaacgcgtgcagtaaccgctttcggcagtacggattcacggtaagcagcatcctgcttgtcaaatgcgtcggtagacggcatggacaccacgcgcgctttcacgccttcggcagtcagtttttcgtaggcagcaacagccagttcaacttcactaccggtagcgatgaaaatcagttccggctgaccggcgcagtctttcagcacataaccaccgcgcgcgatgtttgccagttgctcttcagttcgttcctgctgcgccaggttctgacgggagaggatcagtgcggtcgggccgtcctgacgctcaacaccgtatttccacgcgaccgcggattcaacctggtcacacggacgccatgtagacatgttcggggttacgcgcagagaagcgacctgctcaaccggctggtgagtcgggccgtcttcgcccagaccgatggagtcgtgggtgtaaaccatcacctgacgctgtctcatcagcgcagccatacgtacggcgttacgtgcgtattccacgaacatcaggaaggtggaggtgtacggcaggaagccaccgtgcagggagataccgttagcaatcgcggtcataccgaactcgcgaacaccgtagtggatgtagttacccgcagcatcttcgttgattgctttagaaccagaccacagggtcaggttagacggcgccaggtcagcagaaccgccgaggaattccggcaacagcggaccgaacgcttcgatagcattctgagacgctttacggctggcgattttcgccggattagcctgcagtttagcgatgaactctttcgctttagcgtcgaagtcagacggcatttcgcctttcatacggcgggtaaattcagcggcttcctgcggataagctttcgcgtaagcagcgaatttctcgttccatgcggattctttcgcctggcctgcttctttcgcatcccactgagcatagatttcagacgggatttcgaacggcgcatatttccagcccagttgttcgcgggtcagggcaatttcagcgtcgcccagcggcgcaccgtgggagtcgtgggtaccggctttgttcggggaaccgaaaccgatgatggttttgcacatcagcagggaaggtttgtcagtcactgcgcgcgcttcttctactgcgcgtttgatagatgccgcgtcatgaccgtcgatgtcgcgaataacgtgccagccgtaagcttcgaaacgcattgcggtgtcgtcggtgaaccagccttcaacgtgaccatcgatagaaataccgttgtcatcgtagaatgcaatcagtttacccagcttcagcgtacccgccagagagcaaacttcgtgggagatgccttccatcatgcagccgtcgcccatgaaggcgtaggtgtagtggtcgacaatgtcgtggcccggacggttaaactgcgccgccagcgttttttctgcaatcgccataccgactgcgttggcaataccctgacccagcggaccggtggtggtttccacaccagcggtgtaacccacttccgggtgacccggagttttagagtgcagctgacggaagtttttcagttcttccatcggcagatcgtaaccggtgaggtgcagcaggctgtagatcagcatggagccgtggccgttggacagcacgaagcggtcacggtcagcccaggacggattctgcgggttgtgtttcaggaaatcacgccacaggacttcggcaatgtcagccatacccataggggcacccgggtgaccggatttggctttctgtactgcgtccatgctcagcgcacgaatagcattggcaagctctttacgactggacattttgactccagatcggatgatgaagggcacgcccttaacgacttgacgacagcgcgttttgggctacgccggaaaatttgccaacaatttaccacaagccgcgcgtcatgtacatggaacatccttttgccgcttcagaaatctctggatcatgctcgcatgttgcgcaatctactcgcccgtccgctgcgcttttccttatactgagactgagcgtcgattcacctgcaaacggcgcatttttagaataatcctgaccttgtgcggaagagaaaacatgaaaattcgcgccttattggtagcaatgagcgtggcaacggtactgactggttgccagaatatggactccaacggactgctcagtagtggagcggaagcttttcaggcttacagtttgagtgatgcgcaggtgaaaaccctgagcgatcaggcatgtcaggagatggacagcaaggcgacgattgcgccagccaatagcgaatacgctaaacgtctgacaactattgccaatgcgctaggcaacaatatcaacggtcagccggtaaattacaaagtgtatatggcgaaggatgtgaacgcctttgcaatggctaacggctgtatccgcgtctatagcgggctgatggatatgatgacggataacgaagtcgaagcggtgatcggtcacgaaatggggcacgtggcgttaggccatgtgaaaaaaggaatgcaggtggcacttggtacaaatgccgtgcgagtagctgcggcctctgcgggcgggattgtcggaagtttatctcaaagtcaacttggtaatctgggcgagaaattagtcaatagccaattctcccagcgccaggaagcagaagccgatgattattcttacgatcttctgcgccaacgcggcatcagcccggcaggtcttgccaccagctttgaaaaactggcaaaactggaagaaggtcgccaaagcagtatgtttgacgaccatcctgcatccgccgaacgcgcccagcatattcgcgatcgcatgagcgcggatgggattaagtaaagcctggtggtgtcgaacgtaggtcagataaggcgttcacgccgcatctgacatgaatggcacatttgttaccttgtgcgcattgccggatgcgatgctggcgcatcttatccggcctacgggtgccgaacgtaggtcggataaggcgttcacgccgcatccgacattaatggcacgttttacccgtgcgcatcgcatctggtgcttactcgccctttttcgccgcctgaatatacagcatttccagcgccagcgttgccgctgccagagcagtgatttcgctctgatcgtatgccggagccacttccactacgtccatcccaacaatgttgagatctttcaggccgcgtaccagtttaatagcgcgatcggaggtcaggccgccaatcactggcgtaccggtgcctggtgcaaaagcaggatccaggcagtcgatatcaaaagtcaggtaaaccggcatatcacccacaatctgtttcacttgggcgataacgtcatccacgctgcgatcgttcacctggcaggcgtccagcacggtaaagccgttgtctttatcaaactcggtacgaataccaatctgcacggaatgattcgggtcgatcagaccttctttcggcgcggtatagaacatagtgccgtggtcaaattcacaaccgttcgcataggtatcggtgtgggcgtcaaagtgtaccagcgccattttgccgaaatgcttcgcatgagcacgcagcagcggcagcgtaacaaagtggtcaccaccgaaagagagcatacgcttaccggcagccagcagcttctcggcgtgcgcctgcagcttttcgctcatctcacgggcatcgccaaaggcatataccagatcgccgcagtccacgacgttcagacgctcacgcatgtcgaaattccacgggaagcggttgtgttcccaggccagattcgtgctaacctgacggatcgctgccggaccgtggcgaccacccgcacgaccagaagtggccatatcgaacggcacgccagtaatcacccagtctgcatcgctgtcatacggctggaagttcatcggcaggcgtaaaaaaccaaaggcattggaaaccagactgttatcgtattgatgacctaaggtgctcatggatggactcctattacaaagtcgatataaaaaaacccttccgcgtcgttaggcccgacgaggaagggttggatttgtcacaataaattgtggcggattatcaccgctaaattaagcggattcaagtaacacaggacttactcatcttcaagataagtataaccgtacaaacctgcctcgaactcttcaaggaactgttgttgcagttcagcatcaagatcggttttcttcacttgatcgcggaactgggttaacagcgttttcggatcgagctgtacatattgcagcatgtccgccacggtatcgccttcgtcagacagttctacttctacgctaccgtcagggaagacgaacacgtcaaccgcttcggtatcaccgaacaggttgtgcatgttgccgaggatctcctgatatgcgccgaccataaagaaaccgagcatcggcggattctctggatcgtactccggcattggcattgtcgtggcaataccgtcaccatcaatatagtggtcgatagcaccgtcagagtcacaggtaatatccagcagcacagcgcgacgttccggcacttgatccagcccttccagcggcagaaccgggaacaactggtcgatcccccatgcgtccggcatgctctggaacaggctgaagttgacgtacattttgtccgccatacgttcctgcagctcgtcgataatcggacgatgagcacggttttgcggatccagctgcttttgcacttcatggcacatgctcaaataaagctgctcagcccatgcacgttcttgcaggctaaagatgccggaagagtagccgatatgaatgtcgtgcagatccatctgactgtcgtgtaaccattcacgcagagaacggcgagttcccggttcgtgcatctcctgccaggtttcccacatgctttgcagcgcgcgcggcgcatcttctgcaggcgcggtcggcaccgtgtattcgttacgttccacgccgatgatattagacaccagcacggtgtgatgcgcagtcaccgcacgaccgctttcggtgattaccgtcggatgcggcagaccgttttcttcacacgcatcgccaatcgcccagataatgttgttggcgtattcattgaggccgtagttcacgctacagtcggactggctacgagtaccttcataatccacgcccagaccgccgccgacgtcgaagcactgaatattgacgcccagcttgtgcagttccacatagaaacgcgcggattcacgaacgcctgtcgcgatatcgcgaatattcgccatctggctaccgaggtggaagtgcagtagttgcaggctgtcgagacgcccggcttcacgcagggtttcaaccagttgcagtacctgagtcgcagccaggccgaacttgcttttttccccgccggaggactgccatttaccgctaccctggctagccagacgtgcacgcacgcccagacgaggaacgacattcagacgttctgcttcatccagcacaatggcgatttcactcatcttctcaatgaccagatagaccttgtgccccatcttctcgccaattaatgccaggcggatatattcgcggtctttataaccgttgcagacgatgacgctacgggtcatgccagcatgtgccagtactgccatcaactcggctttggaaccggcttccagacccagcggttcgccgctatgaatcagggactcaatcacgcggcggtgctggttaactttgatcggataaacaaggaagtaatcgccgttatagccgtaggattccctcgcacgtttgaacgcggcgttaatggaacgcaaacggtgctgcaggatctgtgggaaacagaacagtgcaggcagacgctggccctgtgcttcacgagttttcactaactgcgcgagatcgacgcgagcttccgggacgtccgggtccgggcacacgctaatgtggcccagctcgttaacgtcatagtagttattgccccaccaggcaatattgtaagtacgcagcatcttgctggcttcctgggagctcattgcaacctcctgcatggagcgtagtacaccgtgttcgcccgcactgctaggcaaacccatagacatgtcgtcagacatagcgaacctcaaattattttattaagtgtaaaacagttaacgactatcgcagcctggaactggcttaacaacccataagcacatggattttccagcagactatgctgacgctccaactgcgcaaccggtttctttttcataacattattaagcacataaccgaacgtaagtgtgaaagttcggcgaaaccacgagaaaactcttgtttttacaagagcgcccttgttcagtcctcagtaactgtaaccagctcttgaatcctgagaagcgccgagatgggtatagcaagcgcaggtatgcaaagcagagatgcagagtgcggggaacgaatcttcaccagaacggtgagacaggttaagcagcagacaacggttcattatttcgtaagtcctccacggccgcctgttaagacgaacccacaagccaaaactctgattagtacccggctggaagtggcaacacgaaagaaacgtcgtgtgctttttatttaagccgcgcgccgcgttttataccccacaatggcagaaaattgcaaaagataaatacgcagaatgccggcattgtcaggaaaaatttccagccacgtttttaacagaatgagacagctttcaaaaaaaagtggaaatagggtgaagaattgacctaaaatagccatccagatgttaatccatccataccgattaacactcagactgccagtgtttttaacctgcagagtcgtggtaggatccgctaccacagaaaatccacacaacagtttgagctaaccaaattctctttaggtgatattaaatatggcaaaacacctttttacgtccgagtccgtctctgaagggcatcctgacaaaattgctgaccaaatttctgatgccgttttagacgcgatcctcgaacaggatccgaaagcacgcgttgcttgcgaaacctacgtaaaaaccggcatggttttagttggcggcgaaatcaccaccagcgcctgggtagacatcgaagagatcacccgtaacaccgttcgcgaaattggctatgtgcattccgacatgggctttgacgctaactcctgtgcggttctgagcgctatcggcaaacagtctcctgacatcaaccagggcgttgaccgtgccgatccgctggaacagggcgcgggtgaccagggtctgatgtttggctacgcaactaatgaaaccgacgtgctgatgccagcacctatcacctatgcacaccgtctggtacagcgtcaggctgaagtgcgtaaaaacggcactctgccgtggctgcgcccggacgcgaaaagccaggtgacttttcagtatgacgacggcaaaatcgttggtatcgatgctgtcgtgctttccactcagcactctgaagagatcgaccagaaaagcctgcaagaagcggtaatggaagagatcatcaagccaattctgcccgctgaatggctgacttctgccaccaaattcttcatcaacccgaccggtcgtttcgttatcggtggcccaatgggtgactgcggtctgactggtcgtaaaattatcgttgatacctacggcggcatggcgcgtcacggtggcggtgcattctctggtaaagatccaagtaaagtggaccgttccgcagcctacgcagcacgttatgtcgcgaaaaacatcgttgctgctggcctggccgatcgttgtgaaattcaggtttcctacgcaatcggcgtggctgaaccgacctccatcatggtagaaactttcggtactgagaaagtgccttctgaacaactgaccctgctggtacgtgagttcttcgacctgcgcccatacggtctgattcagatgctggatctgctgcacccgatctacaaagaaaccgcagcatacggtcactttggtcgtgaacatttcccgtgggaaaaaaccgacaaagcgcagctgctgcgcgatgctgccggtctgaagtaatctttcttcacctgcgttcaaaggccagcctcgcgctggcctttttcttttggataggcgttcacgccgcatccggcaaaaaaaccgcccgcacaataacatcattcttcctgatcacgtttcaccgcagattatcatcacaactgaaaccgattacaccaaccacaacagacaaagatttgtaatattttcatattattattcggttttcacagttgttacatttcttttcagtaaagtcttaattgcagataacagcgtttaatctatgatgatataactcaattattttcatgcacttaaatcataactaagataaatgttagtgtaagcgattacactgatgtgatttgcttcacatctttttacgtcgtactcacctatcttaattcacaataaaaaataaccatattggagggcatcatgcctgacgctaaaaaacaggggcggagtaacaaggcaatgacgtttttcgtctgcttccttgccgctctggcgggattactctttggcctggatatcggtgtaattgctggcgcactgccgtttattgcagatgaattccagattactagccacacgcaagaatgggtcgtaagctccatgatgttcggtgcggcagtcggtgcggtgggcagcggctggctctcctttaaactcgggcgcaaaaagagcctgatgatcggcgcaattttgtttgttgccggtagcctgttctctgcggctgcgccaaacgttgaagtactgattctttcccgcgttctactggggctggcggtgggtgtggcctcttataccgcaccgctgtacctctctgaaattgcgccggaaaaaattcgtggcagtatgatcagcatgtatcagttgatgatcactatcgggatcctcggtgcttatctttctgataccgccttcagctacaccggtgcatggcgctggatgctgggtgtgattatcatcccggcaattttgctgctgattggtgtcttcttcctgccagacagcccacgttggtttgccgccaaacgccgttttgttgatgccgaacgcgtgctgctacgcctgcgtgacaccagcgcggaagcgaaacgcgaactggatgaaatccgtgaaagtttgcaggttaaacagagtggctgggcgctgtttaaagagaacagcaacttccgccgcgcggtgttccttggcgtactgttgcaggtaatgcagcaattcaccgggatgaacgtcatcatgtattacgcgccgaaaatcttcgaactggcgggttataccaacactaccgagcaaatgtgggggaccgtgattgtcggcctgaccaacgtacttgccacctttatcgcaatcggccttgttgaccgctggggacgtaaaccaacgctaacgctgggcttcctggtgatggctgctggcatgggcgtactcggtacaatgatgcatatcggtattcactctccgagcgcgcagtatttcgccatcgccatgctgctgatgtttattgtcggttttgccatgagtgccggtccgctgatttgggtactgtgctccgaaattcagccgctgaaaggccgcgattttggcatcacctgctccactgccaccaactggattgccaacatgatcgttggcgcaacgttcctgaccatgctcaacacgctgggtaacgccaacaccttctgggtgtatgcggctctgaacgtactgtttatcctgctgacattgtggctggtaccggaaaccaaacacgttagcctggaacatattgaacgtaatctgatgaaaggtcgtaaactgcgcgaaataggcgctcacgattaatctccccaagcttcctcccatcgcggaggaagccacctcttgcagtcatcttttcttcgctctatcctctgccgctatgaaaacatcccgtctccctatcgccatccaacaggccgttatgcgtcgcctgcgggaaaaactcgcccaggccaacctgaagctagggcgtaactacccggagccaaaactctcttacacccagcgcggaacctccgccggaacggcctggctggaaagctatgaaattcgcctcaatcccgttttgctgttggaaaacagtgaagcttttattgaagaagtggtaccgcacgaactggcacatttgctggtatggaaacatttcggccgcgtagcgccacatggcaaagagtggaagtggatgatggaaaacgtgctgggtgttcccgcccgtcgtacgcatcagttcgaactgcaatccgtgcgtcgcaacaccttcccctaccgctgcaagtgccaggagcatcagcttaccgtacgccgccataatcgcgtagttcgtggcgaggccgtctatcgctgtgttcactgcggtgaacagctggttgcgaaataaccatctgaactatcaggaactttcctgatttggctgattgcataccaaaacagctttcgctacgttgctggctcgttttaacacggagaagtgcctacactagcgggattctttttgttaacccctaccccacgcgtacaaccgcgtggggagacgacgcggatttttaactatgcgtatcccccgcatttatcatcctgaaccactgaccagccattctcacatcgcgctttgcgaagatgccgccaaccatatcgggcgcgtactgcgcatggggccggggcaggcgttgcaattgtttgacggtagcaaccaggtctttgacgccgaaattaccagcgccggcaaaaaaagcgtggaagtgaaggtgctggaaggccagatcgacgatcgcgaatctccgctgcatattcacctcggtcaggtgatgagccgtggtgaaaaaatggaatttactatccagaaaagcatcgaactcggtgtaagcctcattacgccacttttttctgagcgctgcggcgttaaactggatagtgaacgtctgaacaagaagcttcagcagtggcagaagattgcaattgctgcctgtgagcagtgtggtcgtaaccgggtgccggaaatccgtccagcgatggatctggaagcctggtgtgcagagcaggatgaaggactgaaactgaatcttcacccgcgcgccagtaacagcatcaatacgttgccgttaccggttgaacgcgtccgcctgctgattggcccggaaggcggtttaagcgcagatgaaattgccatgactgcccgctatcaatttactgatatcctgttgggacctcgcgttttgcgtacagagacaactgcgctcaccgccattaccgcgctacaagtacgatttggcgatttgggctaacggagaagaataatgatcaagctcggcatcgtgatggaccccatcgcaaacatcaacatcaagaaagattccagttttgctatgttgctggaagcacagcgtcgtggttacgaacttcactatatggagatgggcgatctgtatctgatcaatggtgaagcccgcgcccatacccgcacgctgaacgtgaagcagaactacgaagagtggtttagcttcgtcggtgaacaggatctgccgctggccgatctcgatgtgatcctgatgcgtaaagacccgccgtttgataccgagtttatctacgcgacctatattctggaacgtgccgaagagaaagggacgctgatcgttaacaagccgcagagcctgcgcgactgtaacgagaaactgtttaccgcctggttctctgacttaacgccagaaacgctggttacgcgcaataaagcgcagctaaaagcgttctgggagaaacacagcgacatcattcttaagccgctggacggtatgggcggcgcgagcattttccgcgtgaaagaaggcgatccaaacctcggcgtgattgccgaaaccctgactgagcatggcactcgctactgcatggcgcaaaattacctgccagccattaaagatggcgacaaacgcgtgctggtggtggatggcgagccggtaccgtactgcctggcgcgtattccgcaggggggcgaaacccgtggcaatctggctgccggtggtcgcggtgaacctcgtccgctgacggaaagtgactggaaaatcgcccgtcagatcgggccgacgctgaaagaaaaagggctgatttttgttggtctggatatcatcggcgaccgtctgactgaaattaacgtcaccagcccaacctgtattcgtgagattgaagcagagtttccggtgagcatcaccggaatgttaatggatgccatcgaagcacgtttacagcagcagtaacccaccttagcgagaaggatctcgttgagactctgagtgacagcgcccttctttccacgcatactgggcgctgttgcttttttgaaccaggaaacagaacctctgacaatgaatttacagcatcactttcttattgccatgcctgctctccaggatccgattttccgtcgttccgtggtctacatttgcgaacataataccaatggtgcaatggggatcatcgtcaacaagccgctggaaaatctcaaaattgaagggattctggaaaagctgaagatcacgccggagccgcgtgatgaaagtatccgtctggataaaccggttatgctcggcggtccgctggctgaagatcgcgggtttattttgcatactccgccctccaattttgcttccagcattcgcattagtgacaacacggtaatgaccacttcccgcgatgtgctggaaacgctcggcaccgataaacaaccgtctgacgtattggtggctctgggttatgcctcctgggagaaaggtcaactggaacaagaaattctcgataacgcgtggctaacggccccggcagatctgaatattctgttcaaaacgccgattgccgaccgctggcgcgaggcggcaaaactgattggtgtggatattctcaccatgcctggtgtggcaggacacgcctgatgagtggaaccttactcgccttcgacttcggcaccaaaagcattggcgtagcggtcggccaacgcattaccggcaccgctcgccctttgcctgcaattaaagcacaggacggtacgccggactggaacattatcgagcgtttactgaaagagtggcagccggacgaaatcatcgtcggtttgccgctgaatatggacggcaccgagcaaccattgactgccagagcgcgtaaatttgccaaccgtattcatggccgtttcggtgttgaagtaaagctccatgacgagcgtcttagcactgtggaagcccgttccggtctgtttgaacagggcggctatcgggcgctcaacaaaggcaaagttgactctgcctctgcggttattattctcgaaagctatttcgagcagggatattaaggcgatttaaacgcctggcggagtgtaaataatatcatcgcgtcttattgccggatgcggcgtgaacaccttatccagcacacatctggcagcggctataggtctgataagacgcgttagcgtcgcatcagacatttattgcctttgtaggcccgataagcttgcgcatcgggcatggcaacgtcacaaacgcccttcccccacccggtgctgataactctgctgaaacgttatcatccccacctgctgcccggtttgaataacatgcggtaactggtgggttttcccttcgcgaatcaaattccccaccgcgggtgtgttaatcagcaattcaaatagcgccacgcgtccttcctgtttatccacttccagcttttgactcagcactgcccgtaaactacctgccagttgattacgcacggggtctttttcctgcgccggaaaactatccaccagtcgctcaactgcctgcgcggcaccacgcgtatgtaatgttgccagcaccaaatgcccggtttctgccgccgtcagtgccagacggattgtctcgctgtcacgcagctctccgagcaaaatcacatcaggatcttcccgcaatgcggcccgcaatccgcttgcgaacgtcatacagtgcaaaccaatttcccgctgctggatcaaacatcgctggctggcatagagatattcaacaggatcttccagcgtcagaatatgcgcatcggcatgttgattgagatagccaaccatcgccgccagcgtggtagatttgccactccccgtcgcccccgtcaccagaatcaggccattctcgctcttgagtaattccggcaataccgttggtgcgccaagctgttcgagctgcgggcagtggctaggtaacagccgtaacgccaggctaatgccatgccgttgcgcgaatgcgctgccacgcaatcgctggttttccgccaggctcacggcaaaatccagctgaccattctccagcaatattgcccgctgatcgtcatccagccactcccgcagtagctcttcgacgtccggcgtatcaaacggcgcagcttccattctgccgcgaatgcgccatcgtgcgggccaggcgctgcacaggtgtagatcgctgacgttatgctttacactaagggccacaatttcttccatattcatactaagatcctcggaaaatgaacgatattgcgcataacctggcacaggtccgggacaaaatcagtgcggctgcaacgcgttgcggccgttctccagaagaaattacgctgcttgcagtcagtaaaacaaaacctgcgagcgccatcgcagaagccattgatgccgggcagcgtcaatttggtgaaaactacgttcaggaaggggtagataaaattcgccactttcaggaactgggcgtaacaggattagaatggcattttattggcccgttgcagtctaataaaagccgcctggtggcagagcatttcgactggtgtcataccatcgaccgtttgcgcatcgctacccgtctcaacgaccagcgcccggcagaacttccccctcttaacgttctgattcaaattaacattagtgatgaaaacagtaagtccgggattcaactggctgaactggacgagctggcagctgcggtcgctgaactaccgcgtttacgtctgcgcgggttgatggcaatccctgcgcctgagagtgaatatgtaaggcagtttgaagttgcacgccaaatggctgtagcatttgccggactgaaaacgcgctacccgcatatcgacacgctctctctgggaatgagcgacgatatggaagccgccattgcggcaggtagcacgatggttcgtatcggcactgcaatttttggtgcgcgtgattactctaaaaaataaggaattaaaggaacgccatgaatacgttgactttcctgcttagtacggtcattgagctgtataccatggtgctgttattacgcatctggatgcagtgggctcattgtgatttttacaaccccttcagtcagtttgtagtgaaggtaacgcagccaattatcgggccactgcgccgcgttattccggcaatggggccaattgacagcgccagcctgctggttgcctatattctcagttttatcaaagccatcgtgctgtttaaagtggtgaccttcctgccaatcatctggattgccggtttactgattctgctgaaaaccatcggcctgctgattttctgggtcctgctggtgatggcgattatgagctgggtaagccaggggcgtagcccgattgaatacgtgctgattcagctggccgatccgctgctgcgcccgattcgccgcctgctaccggcaatgggtgggattgatttcagcccgatgatcctcgttctgctgctgtatgtcatcaatatgggtgtcgcagaagtattacaggcaaccggaaatatgctgctgccagggctgtggatggcgttatgaatgccgtaacagttaatgatgacggtctggttttacggctctatattcagccgaaagccagccgtgattctattgtcggtttacatggcgacgaagttaaagtcgccattaccgcgccgccggttgacggccaggccaacagtcatctggtgaagtttctcggtaagcaattccgggttgccaaaagccaggtggtgattgaaaaaggcgaacttggccgccacaaacaaattaaaatcattaatccgcaacaaatcccgccagaaatcgcggcgttaattaattaagtatcctatgcaaaaagttgtcctcgcaaccggcaatgtcggtaaagtgcgtgagctggcgagcctgcttagcgacttcggtcttgatatcgtggcccaaacagacctcggcgttgattccgctgaagaaaccggcctgacctttatcgaaaacgcgattctgaaagcgcgccatgcggcaaaagtgaccgctttaccggcaattgccgacgactctggtctggcggtagatgtgcttggcggcgcgccgggcatttactccgcgcgttattccggtgaagacgcgaccgatcaaaagaatctgcaaaaactgctggaaacaatgaaagacgtaccggacgaccaacgtcaggcgcgtttccactgcgtgctggtatatctgcgtcacgcggaagatcccactccgctggtatgccacggtagctggccgggcgtgattactcgtgaaccagcgggcactggtggctttggttatgatccaatcttcttcgtaccttccgaagggaaaaccgccgccgaactgacccgcgaagaaaagagcgccatttcccaccgtggtcaggcgttgaaactgctgctggacgctttacgtaatggttaaattacctccgctgagtctctacattcacatcccgtggtgcgtgcagaaatgcccgtactgcgatttcaactctcacgcgttgaaaggagaagtgccgcacgacgattatgttcagcatctgcttaacgatctggacaacgatgtggcttacgctcagggccgtgaagtaaagacaatctttattggcggtggtacgccgagcctgctttccggcccggcgatgcaaacgctgctggacggcgtgcgtgcgcgtttgccgctggcagcggatgcagaaattactatggaagcgaaccctggcacggtagaagccgatcgctttgtcgattatcagcgtgctggtgtgaaccgcatctctattggtgtgcagagttttagcgaagaaaagctgaaacgacttgggcgtattcatggcccgcaagaagcgaaacgcgcggcgaagctggcgagcggtttagggttacgtagctttaaccttgatttgatgcatgggctgccggatcaaagtctggaagaggcgcttggcgatctacgccaggccattgaactgaatccgccgcatctttcctggtatcaactgaccatcgaacccaatacgctgtttggtagccgaccaccggtgctgccggacgatgacgcgttgtgggatatattcgaacaggggcatcagttattaaccgcagcgggttatcagcaatatgaaacttccgcttacgccaaacccggttatcagtgccagcacaatctcaactactggcgctttggtgactacatcggtattggctgcggcgcacacggcaaagtgaccttcccggatgggcgcattctgcgtaccaccaaaacgcgtcatccgcgtggttttatgcaaggaaggtatctggaaagccagcgtgatgtcgaagccacagataagccgtttgagttctttatgaatcgcttccgtctgctggaggccgcgccgcgcgtggagtttattgcgtataccgggctttgcgaagatgtgattcgcccacagttagacgaggcgattgcccagggttatctcaccgaatgtgcggattactggcagataacggaacatgggaagctgtttttaaatagcctgctggagctttttctggctgagtaaacttgtattgccggatgcggcgtgaacgccttatccagccgacatgtggcagcggttgtaggtctgataagacgcgcaagcgtcgcatcagacgttgattgccggatgcggggtcaacgccgcatcctgctacaaatcgtgcactatatcaaacttacttaatcaccccattgcgccgcagttgttcggtatcttttttccagcgttcattagcttggttgatatcgtcaattttcatcaaaatcgcgacttttttactgtttatttcactaactttcatcgttaacggatattgccctttttcgagcgttacccagtcatcctgcaatttacggctaagtttttgactttgcagaaaagtctgtcgccgttgttcgttgatatcgaaatctcgtttctgctgaatcggcacttcataacactcttcactctgtttatgacatgccgcaatcgccggttgataaacctctttgtcatatttaaccgcgaacgcctcgctatcgttctgtttattaaactcatcacgctgttggtgaatttttttaaaggcgtcttcgcgggtcatttgcttaccgtttgcatcttttccccaatatgcatccgctgctttctgcgccgccaccatttgcttatcaagcgctttcacttccttttccagcgcaggaatgctgttcttctgggtattcaacgcagattcaagctgactaaagcgataattgaaatcttcgctattcacgatcagatatttattattcgttttgatatcgtcgaccacccgcccacgatcgctggctgccgcctgaaaagagtaaaagttcacgctccagccagacgcgggcgttcctttactggttaacatcgcgctgaattttaccggtttatctttcgtccaggtctgttcgagcagttcgtaatctgccaactgaccgacccaggtatagagatcgtcactggaagagacatcgccttccgcactccaggtggcctgattacccttagcatcaagattttttaaggtgatagcatcaagcttgagaatgccgtgatactgctttttgaattgatcttttaagatattttcagttggcggttcgccatctgcccaggcattaccagtcatcaacataagcagtgccgtgccaacaatccattgctttttcacccgaaaaacctcacgcggaataatttattccggtgattatcattagggtaattaaaattggcaatggacgtgagtctgaagtgaaaaagccccggcacgataccggggcgaggcgattagtactgattgaagatctgctggatctgctgcggatctttggtttgcgtcagagccagttgcagcagaacgcgcgctttttgcgggttcagcgtgccagaggcgacgaagccgtatttcgcatcatccacttcggcatcctgagtggtagcgcccgtcggtacgcgggaagaacgcacgactgcagtaccggttttcgcggcggtcgccagcgtgtcgaacacagatttatacaggttgccgttacccacaccagcgctaacgatgccatcatagcccgcatctaccagtgctttagccggaagatcggatgcgttagcgtagttataaacaatgccgactttcggcagttcattcagcttagagacatcgaatggcgtgtcgctggtatgcttacgtgccggggtacgctggtagtcaatcttaccgttgtgaatgtaacccagaggaccgtagttaacagacttgaaggtcgctacgtcggtggtgttggttttggtgacgtcacggccatcaagcacggtgtcattcatcactaccagcacgccacggttggcggaggctttatcagctgcggtcactaccgcgttatacaggttgaatggaccgtctgcgctcatagacgtggacggacgcattgcgccgaccatcaccaccggtttgtcgcatttcaccgtcaggtcgaggaagtaagcagtttcttccatcgtgtcggtaccgtgggtaatgacgaagccgtcggtcttatcgcagtcggtgttaatttttttcgccagtgtcagccagacattatcgttcatgtcctgggagccgatattcactacctgctcgcctttaacgttcgcaatgtcttttagttgcggcaccgcattaaccagattttctacgccaactttacccactgtgtagttagatttggttgcggagtcaccaccaccggcaatggtcccgccggttgctaaaatggtgatattgggtaatgccaatgctgcaccactaaaacccataaccagtgcggcaagtgccgtctttttgaaaaactccatttcattcctccagttacgtgaacgctacgcattatcccttagctctgtatgggaaatttgacgttaaacaatttacaacgtgaatatattttggagatctacaaagttagaggcaggtaacaaaacgaagaattaaacggcataaaaaagtattatgccgtcttaaaatagaggattattttaaattcccgaccagggctttgcggctatcttccagagtcacaacgcggctacaaacatctttgccaaactgctggaaatctttttcctgctttttccactcggtttggatactggattgcagcccccccaggcttcccagcacattctgtaatgggttaccgccgctttttcagcaccgctttcgcgcccatttcattaatgctgtcctgtaaaattccacccattgcctgattcactaattgctggccttcggcgcgaacctgatcaatggctttatagtgaaacgtcaggccatcgctgcgcgtttcaataatgcggttcatctgctctttcagctgcgcatcaagtttggtcagacggctgcgcattttgctgctttcgcccatctcctgaacgataattttatccagagcaatacgggctttctcgacgcggcttttcgcgccttcatcaatccacggcagcgtgctgcgtagttcagcctgataatccttcgcctgctcgcgctgggcggcattcagggaatattgcttaccgttatacatcacgttgccgtctggcgtgatcaccagattgccgttttcgcccttcacctgcacggtttgcgggctgacaatcacatcgtcacgcggcgtgacgctgcactggtagtcggcgtgagcggtcattgccgtcacactaagtgctgccgccagcagcattttgcgcatcatagtcttccctcaagaaaaaatcaggccagcatttgctggccccagattgataacaaagtacgcgttttccatgccggatgcggcgtaaacaccttatcccgcctactcgatcgtgcatctttccaggcctgataagcgtagcgcatcaggcagttttgcatttgtcatcgcccgtatgctttcttagtcccaccaaacgtcgaaaagttcgctggtgcgtacctcatccagtttgcgctcttccagccacttacgcacaatcgcctgatgttcttcggtgcatttgccgatttcctgcatgcagatcagaccttcccaggccagataaccgctgccgtcaaaggccagtttgttcggttcgataacctcgttaataaaatcatcaacggttttatcaatctgttcttcgcttgtaccttccgggaatcgccatgccacgctaaatcctaattcctggaattcgtcgatgtgcatttttttacgcagacgacggctacggttctttgccattatttcaccctctcgaacattaagtcccatactccgtgaccaagacgatgaccacgttgttcaaatttcgtcaccggacgacttgccggacgcggtacgtaatcattgctctcactcaggtttttataaccgtcaatagaagacatcacttcaagcatatgttccgcataaggttcccagtcggtcgccatatggaatacgccccccagctgcagtttgctttttaccagttcggcaaacggcacctgaacgatacggcgtttattatggcgcgctttgtgccacgggtcagggaaaaagagctgcaccatgcgcaaactattgtcaggaatcattttatgcagcacttcaaccgcatcgtgacacatcacgcgcaggttgcttaaaccttcttcatgcgcagaagccaggcacgcaccaacgcccggactatgcacttcaatgccgaggaagtcctgctcagggcgatctttagccattgccaccaggctcgcccccatgccaaaaccaatctcaagcgtcaccggcgcttcacggccaaaaagcgcggggaaatccagcatatcttcgctgaactcaacgcccatcaccggccagtagttttccagcgcatgttcctggcctttggtcagtcgcccctggcggcgcacaaaactacggatacggcgcagtgggcggccgttttcatcaaattccggactaatgacgtcgtttttcataaaggtttagtcgcttgtgaaagtgttctgaaaacgggcattatccaaagttagttgccggatgcaagcatgataaggccgtggctgcggaaagttccggtttacaccctgccgtcgctgtgctgcaatcttgcccccaacaacagtgaattcggtgaccatgcaagcgagccaatttagtgcccaggttctggactggtacgataaatacgggcgaaaaactctgccctggcaaattgacaagacgccctacaaagtatggctcagtgaagtgatgttgcaacaaactcaggttgcgaccgttatcccctattttgaacgctttatggcgcgcttcccgacggtgaccgatctcgccaatgcgccgctcgacgaagttctccacttgtggaccgggcttggctattacgcccgcgcgcgcaatctgcataaagcggcacaacaagtggcgaccttacacggcggtaaattcccggaaacctttgaggaagttgcagcactgccgggcgtcgggcgttccaccgcaggcgcgattctcagcctttctctgggtaagcactttccgattctcgacggtaacgtcaaacgcgtgctggcgcgctgctatgctgtaagcggctggcctgggaaaaaagaggtcgagaataaattatggagtttgagcgagcaggtgacgcccgcggttggcgtggaacggtttaatcaggcgatgatggatttgggtgcgatgatttgtacgcgcagcaaaccgaaatgtagcctctgtccgctacaaaacggatgtattgccgccgccaacaatagctgggcgctttatccgggcaaaaaaccgaaacagacgctgccggagcgcaccggctactttttgctattacagcacgaagatgaagtattgctggcgcagcgtccgccgagcggattgtggggcggtttatactgtttcccgcagtttgccgacgaagaaagtttgcggcagtggctggcgcaacggcagattgctgccgataacctgacgcaactgaccgcgtttcggcataccttcagccatttccacttagatattgtgcctatgtggcttcccgtgagcagtttcaccggctgcatggatgaaggcaatgcgctctggtataacttagcgcaaccgccgagtgttggcctagcggctcccgtggagcgtttgttacagcagttacgcactggcgcgccggtttaacgcgtgagtcgataaagaggatgatttatgagcagaacgattttttgtactttcctgcaacgtgaagcagaaggtcaggattttcagctgtaccccggcgagctgggaaaacgcatctataacgagatctccaaagaagcctgggcgcagtggcagcacaagcaaaccatgctgattaatgaaaagaaactcaacatgatgaatgccgagcaccgcaagctgcttgagcaggagatggtcaacttcctgttcgagggtaaagaggtgcatatcgagggctatacgccggaagataaaaaataaaaacagtgccggagcacgcctccggcaacttgcataaaaacaaacacaacacgcacccggaatgatgaaaaaatatctcgcgctggctttgattgcgccgttgctcatctcctgtagcacgaccaaaaaaggcgatacctataacgaagcctgggtcaaagataccaacggttttgatattctgatggggcaatttgcccacaatattgagaacatctggggcttcaaagaggtggtgatcgctggtcctaaggactacgtgaaatacaccgatcaatatcagacccgcagccacatcaacttcgatgacggtacgattactatcgaaaccatcgccgggacagaacctgccgcgcatttgcgccgggcaattatcaaaacgttattgatgggtgacgatccgagtagcgtcgatctctattccgacgttgatgatattacgattagcaaagaacctttcctttacggtcaggtggtggacaacaccgggcagccgattcgctgggaaggtcgcgcaagcaacttcgcggattatctgctgaaaaaccgtctgaagagccgcagcaacgggctgcgtatcatctacagcgtcaccattaacatggtgccgaaccaccttgataaacgtgcgcacaaatatctcggcatggtccgccaggcgagtcggaaatatggcgttgatgagagcctgattctggcaattatgcagaccgaatcttcctttaacccgtatgcggtcagccgttccgatgcgctgggattaatgcaggtggtacaacatactgccgggaaagatgtgttccgcagccaggggaaatccggcacgccgagccgcagtttcttgtttgatcctgccagcaatattgataccggcaccgcgtatctggcgatgctgaacaatgtttatctcggcggaattgataacccaacaagccggcgttatgccgtcatcaccgcctataacggcggcgcaggcagcgtgctgcgagtctttagcaatgataagattcaggctgccaatattattaacaccatgacgccgggcgatgtttatcagacgctgacgacccgccatccctctgcggaatctcgccgttatctttataaagtgaataccgcgcaaaaatcctaccgccgccgataattccattaaccgcccctgacgatgctcaggggcaaaaatgttatccacatcacaatttcgttttgcaaattgggaatgtttgcaattatttgccacaggtaacaaaaaaccagtccgcgaagttgatagaatcccatcatctcgcacggtcaaatgtgctttttcaaacactcatccgcatcacgatgtgaggaaattaacatgaatcttaagctgcagctgaaaatcctctcttttctgcagttctgtctgtggggaagttggctgacgaccctcggctcctatatgtttgttaccctgaagtttgacggtgcttctattggcgcagtttatagcagtctgggtatcgcagcggtctttatgcctgcgctgctggggattgtggccgacaaatggttaagtgcgaaatgggtatatgccatttgccacaccattggcgctatcacgctgttcatggcggcacaggtcacgacaccggaagcgatgttccttgtgatattgattaacagctttgcttatatgccaacgcttgggttaatcaacaccatctcttactatcgcctgcaaaatgccgggatggatatcgttactgacttcccgccaatccgtatctggggcaccatcggctttatcatggcaatgtgggtggtgagcctgtctggcttcgaattaagccacatgcagctgtatattggcgcagcactttccgccattctggttctgtttaccctgactctgccgcatattccggttgctaaacagcaagcgaatcagagctggacaaccctgctgggcctcgatgcattcgcgctgtttaaaaacaagcgtatggcaatcttctttatcttcagtatgctgctgggcgcggaactgcagattaccaacatgttcggtaataccttcctgcacagcttcgacaaagatccgatgtttgccagcagctttattgtgcagcatgcgagtatcatcatgagcattagccagatctctgaaaccctgttcattctgaccatcccgttcttcttaagccgctacggtattaagaacgtaatgatgatcagtattgtggcgtggatcctgcgttttgcgctgtttgcttacggcgacccgactccgttcggtactgtactgctggtactgagcatgatcgtttacggttgcgcattcgacttcttcaacatctctggtagcgtgtttgtcgaaaaagaagttagcccggcaattcgcgccagtgcacaagggatgttcctgatgatgactaacggcttcggctgtatcctcggcggcatcgtgagcggtaaagttgttgagatgtacacccaaaacggcattaccgactggcagaccgtatggttgattttcgctggttactccgtggttctggccttcgcgttcatggcgatgttcaaatataaacacgttcgtgtcccgacaggcacacagacggttagccactaattacgcaaagaaaaacgggtcgccagaaggtgacccgttttttttattcttacttcaacacataaccgtacaaccgtttcacgccatccgcatcggtttcgctataaacaccttgcagctccgggctaaatcccggcaacaaattcaccccttcttccagtgcaaggaaataacgttgaaccgccccaccccagacttccccgggtaccacgcaaagcacgccaggtggataaggcaacgccccttctgccgcaattcgcccttcggcatcacgaatccgcaccaactccacgtcaccgcgaatataagcgctatgcgcatcctgggggttcatcaccacactcgggaaactctgctggcggaacatcgctttttgtaggtctttgacgtcgaaactgacatacagatcgtgcatctcctgacacaactggcgcagggtgtagtcgcgatagcgcaccggatacttgttataaacgctcggcaacacctcaaccagcgggctgtcatcctcaatatgctgttcaaattgcgccagcatcgccaccagttgtgccagcttctcgtggctttccgccggagttaataaaaacagaatggagttgagatcgcacttctccggcacaatgccgttctcacgcagatagtgcgccagaatcgtcgccggaacgccaaagtcgctatattcgccggtttcggcatcgatacctggtgtagtgagtaacagcttgcacggatcaacaaaatactgatccgcggcatatccttcaaagccgtgccacttcgcccccggctcaaaactgaaaaaacggcggtcgctggctaacacacttgtcggataatcctgccacaatttgccatcaacaacgggcgggataaacgggcggaacagcttacagcgcgcaagaatagccttgcgcgcttcaatccctatctcaacacactcagcccacagccgacgcccactctccccttcatgaattttggcgttaacatccagtgcagcaaacagcggatagaaagggctggtagaagcatggagcataaaggcgttattcaaccgcttatgcgggcaaaaacgcgcctgtccgcggatatggttatcttttttatggatctggctcgtctgactgaatcccgcctgctgtttgtgcacgctctgagtcacaaagatccccggatcgttttcgttaagttctaacagcagcgggctgctatccgccatcatcgggataaattgttcataaccgacccacgcggaatcaaacagaatgtaatcacacagatgcccaacggtatcgatcacctgacgggcgttatagacagtgccgtcataggttcccagctgaataatcgccaggcgatacgggcgcggcaggtcggctttttctggcgcaacgtcgcgaatttgctggcgcagatactcttcattaaaacagtgcgcatcaataccgccaatgaaaccaaacgggttgcgactagcttccagatagaccggcgtcgcccccgcctgaatcagcgcgccgtgatgattgctcttatggttgttacggtcgaagagcaccagatcgccacgcgttaacagcgcattcgtcaccactttattcgctgcgcttgtgccgttcagcacaaaataggttttatcggcatgaaagactttggctgcgaatttctgcgcatctttcgcgcttccttcatgaataagcagatcgcccaattttacgtcagcgttacacatatcggcgcgaaagacgttctcaccaaagaaatcgtaaaaatggcgtccggcaggatgctttttaaaaaacgcaccatgttgatgtccagggcaagcaaaggtgctgttgcccatctcaacgtactgcgtcagcgtgtcataaaacggtggcagcaaattctcttcatactgacaggctgcggattccagctccagccactgctgctcgttgccgttgattaccgccgtaacgcccgcaggtaattcaacagcatgttcggaatacaaaaacaccggtagatgaaaaccggtgcgcttaagcaacgcaagaatgccactgcgactatccgcagcggtaatgacgactgccgcgacgtccgtaaaatcagtatctcccaacgccaccacgcgacgatgagaagaaagtcgggataccagttcactactggcggcaatattcatacttttcataagcgcaaacccgtttcggggaagtaagaataccggacaaggtggaaaaccctgccccatgagatatgggtcaaactggtcaccagctccgaccgccagacatcagtaaaagcagaaacgctctgattttactgttgtcctgcagtgagcgtgcgttaacttcaccgcatgagcagtaacatagaaagggaaacgtttcgcgcgaaacggcgataagcgagagaatgtaaggagatggcgtgcatcgggcaaactccgtacagagaggagaaaattcgcgcaatcatggcacctttcgctaaagcgtgcaagccaggactttgcgaacaaacaagccatcgacggcaccaaacggtcataataagaaaatcaaacaatacagctaacaggaactcttgtggtcatcggcccttttatcaacgctagtgcagtcttactgggtggcgttctcggcgcactgctcagccaacgcttaccggaacgtatccgcgtctccatgacaagtatttttggtctggcaagcctggggattggtattttactggtggtgaaatgtgccaaccttccagcgatggttttagctacgctacttggcgctctaattggcgaaatttgtttgctggagaaaggtgtcaatacagcagtcgccaaagcacaaaatctgtttcgtcacagtcgtaagaagccagcgcatgaatcttttattcagaattatgtcgcgattattgtcctgttttgcgccagcggcaccgggatcttcggggcgatgaacgaagggatgaccggcgatccgagtattttaatcgccaagagttttcttgatttctttacggcgatgatcttcgcctgcagcctgggtattgcggtaagcgtgattagtatcccattactgatcatccagttaacgctggcgtgggctgccgcgctgattttaccgctgaccacaccgagcatgatggcagacttcagcgccgtaggcggtttattgctgctggcaaccggattacgcatctgtggcattaaaatgttcccggtggtcaacatgcttccagcactccttctggcaatgccgctttccgccgcctggaccgcctggtttgcctgacaatgcgtgcaatatcggcaaagtgatgatagattgtgcagtctgcagtaaattgaagaaatttgattgacgagacgaggcgaatcaggtttaatgcgccccgttgcccggatagctcagtcggtagagcaggggattgaaaatccccgtgtccttggttcgattccgagtccgggcaccactaattcttaagaacccgcccacaaggcgggtttttgcttttggatctgacaataaccttcacgaaaaaaattagcttataaagtctgggggaattactctcgccacgttaacgagagtaattttattgatattaatctcctgatactttacccccgtccaaactccagccgctgcacattcaccatcccaggcttctcagcagcactgacatcaatttgtgtcacccgcagcgcatagaacgccattttgaatttacgaacggacgcattatcagtgactttaacggcatgggcaaagtgaaatatcattttttaacgataaaaagagtgttatttcttgtgtatcagacaataagcattcattcaaaacctttagaaataatcaaaacacaggtattccactggttaatatattcacatatgaaatgaataaatattggaatatataaatattgaatattttgattaatccccgtactgattattcttcataatcagtacggggttgctacaacatgtattactttttcaccacaattaacggttcaatatcactctcttttttgatgaccagactttcatcaccgcgcaaacacgtcccaccgtagttgccgccaacggtgaaggtacatacctgaatgtatttaccgtccactttcggcaaacaccacagttgctgatagatgtttttctgctcggcaaatttaccgctggttttgtccagcacctcttcatgatggctgacgaggtcgatattgctgccacagcgaccggcgatcggtttcactgcgtaacctgttttcaccagttcatcattaacagtgaaatcggtatccagcaggtaacgatggtgcgggaacaggctccagaggatcggcagaatcgctttgttgccggggatcaccgtccacagcggctcaaagaccagcacttccgggcgcagcaatacgtcgataagacgcacttcgttttgcggatgaccggtacggattggcaccgcagcaaactcacggtcgctaacttcacgaatctgatcaaacgcggtttcccacgcccaggttttccacacgcagttaaccagtcgcccttccccatcaatcagttgcccggcagcatcccagcccagttcatccaatccacgcaagatacgcgtttcaaagcccgcctggtgcagcgcctgctccataaactgcgcgtgatagttttcctcgatatctttgtcctgcatgatatggacaaacggacgtgcacgactgtgtttccaggcaccagccaattcgttaatcagcccttccgccggattgaagccgttgcctttatagccctgctccgcccaacgttcgaggatcaagcccgcttcggtatgacaggaggcggagtcggcgttgtactcgtaaaccttcaggccacgctcatccatgcagaaatccatacgaccagtgatcatatggtgacggcgacgctgccaggagagacgcaaacgtggccagaggattttcgggatgtcgaacagcgccagcaggttgtcatctttcagcaccttgtcggttgcgtgaagatacatcaggtgcagctcgttggtggctttaattagctcctgctcggcactctcggtaatggtgtagtaatgataaggatcctgattgatcacctgaccgttggcctgcacataggcgttttgcagcggatctttttcatccagccatttaccgtcaaactggcctttgttttccaggcgcgctccgctgattttcagcagctcgcctgcaatttccggctgcggtaagctgtattcagtatcttccgtctggatcatccagcccagaatggtggtgtcatcaaaagtgtctttcagggtatagcagccgttttcgaccaccatctccagctcgcgcgtccactgttgcccttgcggcaacggggaatgaatcacgttctgttccgcaatacggactttgttgccatgcaattgggtaatgatggcgacatggccagtgtctttaaattcaccgcctttatcccagataagaagcgcacccgcgaccggcgcacgcgggctgccgttaggaaatgcctgcaatggcaggatgttgtcattaaccacttctcgcaggaagcgcaggctgaaaatctcccacgccatacccacgtcagtaaagaccacaccgtaattcagaaagagaaaacggcgagcaaattcaacgcattgccacttgtggcccatatattcgtcgtcgatatagctacggaatacggcgtcatcttcgtattcctgcggatcgagagaactgtaatcactagagtagattgctaccccacctggggcgtagcccaataatgtcccgaacggggcatcctggctggtcgttcctttgctcatcactttacctttaacaatacaacctaagcagttggcgtaattgttgtgctctgattacctgctcagcgacattaaccggacagaggtcagactaatcatacacctcatcgcagcggctggcgcaaagggttaaaaaattcacattctgtacagcaagtgacctgctacactgcttcaacactaccactcagaaggcaactcactatgacagacaatacttatcagcccgcgaaagtctggacgtgggataaatccgctggcggcgcgttcgccaatatcaatcgcccggtttctggtccgacgcatgaaaaaacgctgcccgttggcaaacacccattgcaactttatagcctgggaacgccgaacggtcagaaagtaacgattatgcttgaggagctgctggcgctgggcgttactggtgcagagtacgacgcctggctgattcgtattggcgatggcgatcaattctccagcggctttgtcgaagtgaacccaaacagcaagatcccggcgctgcgcgatcatacgcataatccgccgatccgcgtgtttgaatctggtagcatcctgctttatctggcggagaaatttggctacttcctgccgcaggatttggcaaagcgtactgaaacgatgaactggctgttctggttacagggcgcggcaccgttcctcggcggtggttttggtcacttttaccattacgcaccggtaaagattgagtacgccatcaaccgctttaccatggaagccaaacgtctgctcgacgtgctggataagcaactggcgcagcataagtttgttgcgggcgatgagtacaccattgcggatatggcgatttggccgtggtttggcaacgtggtgttaggtggtgtgtatgatgccgctgagtttcttgatgcgggcagttataagcatgtacaacgctgggcgaaagaagtaggcgaacgtccggcggtgaaacgtgggcgtattgttaaccgcaccaacggaccgctgaatgagcagttgcatgagcgccatgacgccagtgatttcgagacgaatacggaagataagcgtcaggggtaagggttggtgttcgtcgcagcaagccatccaggccggataaggcgttcacgccgcatccggcaatcgtgcacaatgcctgatgcgacgctgccgcgtcttatcaggcctacgaaagctaatcatcacgcgctggtaatgtcgtaatccatttggcgcagtgcgtctaatgtggctttggcttcatcttcgtcgatgatgctcatggcaaatccgacgtgtaccagcacccactggcccagtagatcggcagggttaccttcacaaatcagggcgatattcacatcgcgcttgataccacatacttcaacctgcgcaagctggtgaatatcttcaccgacagccagcacctggcctggaacgccaatacacattattaactccggttattcaacttcaatacttttgacgatcaggctatcgccggtatcgacacgcaaccgctcgccgtgacagagcggacactgcgcatcgtgctgatgaatctccaccacctggctgcaatcccagcaccaagcctgggcgggtttatagacgatatgtaaatcgcacccttgcgccaccgttccgtggcagacaatttcaaaactaaaacggacggcgctctcctcaacgcaggagagcgcgccaatttccagccacacggcggtgacgcgcttaacatcgtgctgctccgcctgccgttggataatttcaacggcgctctggcaaagagacaactcatgcattttcgccactcctgcgaccaaacagcagggcgcgacgccctgcgtgtggtacatccggattcgtgactggcaggctaaggatcattcgtgcgcagtcatccgtcaggcgttggccctcttcaatgctcatgctgtggctaagcgggctcatcaggctacaggagagatattggctaacaccgtccagttcgccaacggtaaaggtcatagtgccatacggcagttgcagaccaattttttcactcactttgcgcagcggccagagttgatccgggccggggaagataactgcactcagcatccacggggtgatcacacaccccgtccactgaccttcgaacagcgtaaaatcagaaacatacaccggcatactaggatgcagaaaagagagatcgtgcatgctacgccgggcaatttcttcaaacgctgcctgtacttgcgccttcggggaggtctggaaacctgctatctcttcagtcatgaatcgcctcccgtgggatggcttccacgccagattcacgcagcgcagccagaacctgctcaagcgcaggttcaatcattgcttcaaccgtcggcgttaagccgatgtgtggctccaggctttccgggatcacgccgaccagggtcagctttttcggaaactcgccggtgaagcgcagggcgctcaagacgtcggccaggccaagctgatgcggagagattttgttggtaaacaacgccggaacttcttcatcccgcaggatcatcatcgttcccggcgcgttctttttgctgacaatggcatccgcaataatcaaatgatcgcgatttgccatgtcgccaagcagctccattcccgccgtgccgccatcgaggatctcaacataatccggcagaatgtatcgttgctctaacgcttcgacaatccgcacaccgatggcttcatcggtcagcaaaatattgccgacccctaagactaaaatacgcattacagaaccttcacactaaccacttcgttgccgtcagcatccactacgtgtaccgcacaggccatgcacgggtcaaaggagtgaatggtacgcaccacttccagcggtttattcggatcggcaaccggtgtacccaccaggctctgctcgtaaggaccgacgtcatcattgaagttacgcggaccagagttccaggtacttggaacaaccgcctggtagttgctgatgataccgtctttaataaccatccagtgagagagcataccgcgcggcgcttcgaggaagccaacacctttgaattcacccgttgccggaatgttcggcttcacaaaggtggtgtgatcgcctttgccgatattggtgatcagtgcactgtattggttttgcaggatatcctgcaattcacagcagtgaacggtacgaccaataatacggcccagcgtggagtgcagctgtgccacttccagcgtgttgccagtcagtttctgataaatcgcaacgatttcattcagtttgttctgggtagattcgcgacctgccgccagtttcaccagcatattagccagtggccccacttctaccgttttgccgtagaaagtcggacttttcacccaggaatatttcccgtcgtcagaccaaccatcataagccggaatggtggtgccttcccacggtgcctgcggcgcttcgtctttataccaggagtgcttcgcgctttcctgaatgcctttgatcaggtattcatcggaatgagaagtgatcggacgatagctggacagatccgcattctcaatgtagccgcccgggaacaggaagctgccgtttttactgtcggtcgggaattccggcacgctcaggtagttcaccgcacctttaccgcgtgtcagccattccgggtagaacgcggcaataactgcggtatcaaccttataaacctgctcaacaaagtcgctcagtttgtcgatgaaagacttgatgtacatcaggcgctcaaggttcagcacgcccaaaccgtcgaggttgatcgggttcgcgacaccacctaccgccaggttctgaatgtgcggcgttttaccgcccagcagcgccacgacgcggttagcgtcacgctggcactccaacgcttgcaggtagtgcgctaccgcaatcaggttcacttccggcggcagtttcatcgccggatgaccccagtagccattagcgaaaatacccaactgaccgctggcaaccagatctttgatcttgttctgaactttggtgaactcttccggactgttcaggtgccaggtgctaacgcctttcagcatttcggaggctttggttgggtcagcttgcagtgcagaagtgatgtccacccagtccagcgcgctaagctgatagaaatgaacaatatggtcatgcgtggtgtgcgcagccagaatgatgttacggatgtattgcgcgttaaccggaacgtcgatattcagcgcactttctgccgcacgaacggaagacagcgcgtgagtggtagtacatacgccacagatacgttgcacaatcatccatgcatcgcgcggatcgcggtttttcacgatctcttccatgccgcgccacatggtaccggaagcccatgctttgctaacgacgccattttcgatttcgcaatcgatgcgtaaatgcccctcaatacgggttaccggatcaatagtaattctctggctcatgctttgctcgcctcatgacgattatgatcgttttgttttaaaggaggaagtatcggcagtagacgaatgagtacgatgtaagcgcaaatctcaatagccacaaaaccaatagaaatcaacagttcttcccaggtcgggaagtaggcgtaaccgccgcccgggttgaatgccaccaggctataggtcagacgccaggttgcacaacctaacagtgcgctcagtgcactcaggaacagcatgcgggaatcattacgcagcttcgccacacgcagaacgaccagcgggaagagcatcagcaggacttcaatccagaacatcacggagtagaagtcaccggcaaacgctaagctcagcttgtcgcgatagataagctcgccaaagcgcagcacgatgaaaatcgccagcaacacactgatggtgttggtcagcttaacaaacagactcttttcatccggaccgttgccacgcagacccgcctgcaccaggctaccttcaaagatgacaatgctgaagcccatgatgaacgccgtcagcaggctgaacagcggcaacatttcatagctctgccacaacggatgcaccttgtagcccgcgctgatcatcaggctccccatactagactggtgcatggtcggcagcagcgcaccgagcgcgatgatgaagaacatcaccttgtttagtcgctgtaggctcaccttccaccccagacgttcaaacagtgccggagcaaactccagtgccatcacgccgatatagatggtcatacagaccgccgtctcgaacagtacgctgttcacgttgaagtgacccggaatgtagaagtacggcaggttccagtagcgacccacgtcgatagtgatgctcaagccacccagactgtaaccaaacagactcgccaacagcgccggacgcaccagcggatggtattgcccacggttaaagacgtataccgcccacgccagcgcccagccgccacaggcaaagccggtgccaatcagcaggtcaaacgcgatccacacgccccacgggaagccgccgttcaggtcagagacagagcccagaccgaacaccagacgcttcacaatcaggagcatacagatgacgattaacggtccaaaaatcatgaccggtttactgatgattttgccgcccagcggttgtggatcatgactcatgatcgtctcctccgtcgtgattattcaactctcatgatcgtctcctccgtcgtgatggtcgtttttggtgttgcgacgaaccagcacggttaagcccgccagcacagccagtggtagcatcatgcctttatacagggtgtgttgaatattttcggaacgcgcaccggtagaaagatcgtccagtttcggcaggtcgagattttcataaggcacacccgtcagtaccagaacctgagtaccgccgccctctttctcgccgtacagatgcggataatatttcggcaccgtatgcaggtaagtgtcgccagatttcagcgtctgacgcggatagtggtattcgctgccaggcttcagcgccagacgttttttcgcctccgccatcagctcttcacgcgtaccgaaaatcaccgcgcccgccgggcacacttctacgcagccaggtagaccgcctttatcgagacgttccacacctttctggttgcacagctcgcacttatgcagcgcaccaaacgggttgttgtagtcgtacttcggcacgttgtacggacaggcgaccatgcagtaacggcagccggtgcacacatctttgtcgtaatggacaatgccggttttcggatcttttttcagtgcagagaccgggcacacagagacacagttcggatcgacgcagtgcatacactgtttcttaatgtacgcgtagccgttctcctcctggtctttgttgacccctgtgccgctggtccacacctgaatgatgttattggtatacgggctcagtttgtcgttgttgctccaggtctgttccccttgcgggttacgttcagggaaattgatatcctgacacttggtgacgcaagcctggcagcctacgcacaaggtgctgtcgtacaacatccccaggcttcccggaattggcgggcggttttcagcagccgcatgactgacagacggcagcgcgcccgtcagcaatgccccgcaggaggctgctttaataaaattacgtctgttcacggttattctccccgactgtcagcgttatctttcttttgctgacgacccagttcacgcaccgccatcacgctgacaccggcaaccaacccaaccacaccgccgagcaaaccaatagcgcctgcagagacgttgccgccctctttagcgttaacatccggtttctgactacgcggagtttgattttcgacgttggcaagctgatggatgcctttatggaagccgataccttcttcgttacagccatagcaagggtgaccaatcgccaccggccacacaccgccaacatcgcagaattgcagcgtactgcagttgccgtaagtttctggccctttacagccgaggtggtacaggcaccagccttcgcggtggccttcatcaccgaactctttggcaaaacgaccagcatcgaagtgcgggcgacgttcgcagtgttcgtgaatcagacggccataggcgaaggtcggacggtttttgtcatccagtttcggcggtttgccgtaagtgatgatgtgcgcaacggtcgcgaggaagttgtgcgggttcggcgggcagcccggaatattgataacggttttgcctggcagaacttcttgcaggctgactgcgccagttgggttaactccagctgcggcaacaccgccccacgcagagcaggaaccgatagcgataatggctgctgcgccttccgccgctttgcggatgtgatccacaatcggctcaccggcaaccatgcaataaataccgttatcttttaatgggatggaaccatccaccactaacacatactgccctttgtacttctcgagagcgttatgtttgttctcttcgacctgatgaccgaaggcggcggaaagcacttcgtgatactccagagagatagtctccagtacgaggttttctaccgttggatgcgttgcacgaagcagagattccgtacaaccggtgcactcctgcgcgccaatccagataactggcggacgctgcgggttagtaacgctttcggccatctctgcagcggctttgctacttaaccccatggtggcggctaatgctgcacaaagcttcatgaaatcacgacggttaatgccgtgagaatggatgagggtgttatctccagtcatttatagttattccgttgcgaagacctggcatatattttgcctcaatcgcaaaatcaataatgcgatcgatgcgccatttaccacacatttattatggttatcgatatcatgatactgcggcggggcgctaaaacgaagggaagaagcattagtgtaattaattaaagcaagataatacgtatgtttgatcaattttcgaggcgataaccggccataaaaaagcgcaacgtagaacaggaattattctcacgaaagaaatccattaccatctctttatccagtccatagcggcgcgtcagaatacccgcttcccaggcgctaagctggcgatctccggtcttttcgtacatccggtgactgtagcctaatacaaaaccgcgtttataatcggcacagaattttgtcacattaaccgcactgtcggcatgcgttgcttttaatcccgccattaagcctttaccaaaatggttattcatcgttcacctcattcgctatatattgtcatatatagcgatattttaggcaaagaacgacttttgcgcacgctattttttcatgcttgtttaagacgtaatcccgtaagagataaacctatcaggagagatatttatcgaaccatttcagtgtcctttgccaggcaagatcggcggcagatttgtcataacggggcgtggaatcattatggaatccgtgattaacccccggatagatatacgcctcataaaccttattattggctttcaacgccgcctcgtaagcaggccagccctcgttgattcgggtgtccagttccgcgaagtggagtagtaaaggcgcttcaatcttcgccacatcggcagtgggtgcctgacgaccataaaacggcaccgcgcaggccagttccggatacgcgacagccgccgcgttgcttacgccaccgccatagcaaaatccggtaatacccactttgcctgtcgcttgcggatagcgttgcataaactcaattgcggcaaagaaatcattcatcagtttgttggatcaacctgctgttgcagctcacgacctttatcatcatttcccggataacctccaacggaacttaagccgtcaggtgccagggcgatataccccgccttcgccactcgccgtgccacatcttcgatatacggattcagtccacgattctcatgcaccaccactacggctggcgttttgccgctcatctttgcgggcttcaccagataaccccgcacctcgccgtgaccatttgggctaggatacgtgatgtactcagcaacaatttccgggtcggtaaactctacctgagtcgccagcgcataatttggcttgagcaaatcaaacaacgctaatgccgtcatcccgcctaccgcacttcgccgcaaggttgaggaactcacgtttcgagattttcccgtgagcgtaatagtcatagtaatccagcaactcttgtgggaaatctttggcggttaaacgcggcatcgttgcactcctcagttggtgtttttttaagcaaagcataagcacgtatttttgcccagtttttcgtcactctgtgagccagactacgggatacgcgctggcgaatcgctaaactagaaacattgtttcgaaattgaacggtggaaaggagaggtcatggtctggttagcgaatcccgaacgttacgggcagatgcaataccgctattgcggaaaaagtggtttacgcctgcccgcgttaagcctcggtttatggcacaatttcggtcacgttaacgcgctggaaagtcagcgtgcgatcctgcgtaaagcgtttgatttgggcattacgcactttgatttagccaacaattacgggccgcctccaggaagcgcagaagagaactttggtcgcctgctgcgggaggattttgccgcttatcgcgatgaactgattatctctaccaaggctggctacgatatgtggcccggcccttacggctctggcggtagtcgtaaatacctgctcgccagcctcgaccaaagcctgaagcgtatggggcttgagtatgtcgatatcttttactctcatcgcgtcgatgaaaatacgccgatggaagaaaccgcctctgcgctggctcatgcggtacaaagcggtaaggcgctgtatgtcgggatctcctcttacagcccagagcggacgcaaaaaatggtcgagttgctgcgcgagtggaaaattccgctgttaattcatcaacctagctacaatttactgaaccgctgggtggataaaagcggcctgctggataccctgcaaaataacggcgtgggctgtattgcctttactcctctggctcagggattgctgaccggaaaatatctcaacggcattccgcaagatagtcggatgcatcgtgaagggaataaagttcgtggtctgacaccgaaaatgcttaccgaagccaacctcaacagcctgcgcttattgaatgaaatggcacagcagcgtggacaaagtatggcgcaaatggcgttaagctggttgctgaaagatgatcgcgtgacgagcgtattgattggtgccagccgcgcggagcaactagaggagaacgtgcaggcgctgaataatctgacatttagcaccaaggagctggcgcagattgatcagcatatcgccgatggcgagctgaatctgtggcaggcgtcttccgataaatgacctgttaataacgggcgcgcgaaccgcgcccgaatcagatcagtgattatgacgagtcagtcggtcaagatagcccatcacaaatgcagaaagcacaaacgtcagatggataatgacgtaccacatcagtttgttatccgggacatttttcgcatccataaagacgcgcagtaagtgaatggaagaaattgccacaatgctcgctgctactttgtttttcaggctcgttgcgtccattttccccagccagttcagcttctctttgttctcggagatatccagctgactgacgaaattctcataaccggaaaacatcaccatcaccagcaaaccgccaaccagcgtcatatccaccaggctcagcaacacgaggatcaaatcactttccgccatgctgaagatattcggcagtacgtgaataatctcctggaagaacttcagcgccagggcaactaacgccaggctaaggccaaagtacacgggggcaagcagccagcgagaagcatacattgcattttcaagaaaacgttccatacattcctgtcgtgtagttaaaacgggcaacagtatatcgcaattgagtaaacagcacgcaacagcaaatcaacatatacgttaaacctttgtcgcataattctgaggtttagggatcttcctggttcccttatcaacgcatcgagaacgtctacccttaaaggacgttgaacctgaagggagaaaaacgatgtctcatttaaaagacccgaccacgcagtattacactggtgaatatcccaaacagaaacaaccgacgccaggcatccaggcgaagatgacaccggtaccggattgcggcgagaaaacctatgttggtagcggtcgcctgaaagatcgtaaagcactggtgacagggggcgattccggaataggtcgcgctgccgccatcgcttacgcgcgtgaaggggctgacgtggcgatcagttatcttcccgtggaagaagaagacgctcaggatgtgaaaaagatcattgaagaatgcggacgcaaagccgttctgctgccaggcgatttaagcgatgagaaatttgcccgtagcctggttcacgaagcgcacaaggcgttaggcgggctggatattatggcgctggtcgccgggaaacaggttgccattccggatattgcagacctcaccagcgaacagtttcaaaagacctttgccattaacgttttcgcgctgttctggctaacccaggaagcgatccccctgctaccgaaaggtgcaagtatcatcaccactagcagtatccaggcataccagccaagtccgcatttactggactatgcggctacgaaggcggcgattctgaactacagccgtggcttggcaaaacaggtcgcggagaaaggtattcgggtgaatattgtcgcgccaggcccgatctggacagcactgcaaatttccggcggacaaacgcaggataagatcccgcagtttggtcagcaaacgccgatgaaacgtgcggggcaaccggcggaactggcccctgtatatgtttatctggcaagtcaggagagcagctacgtcaccgcagaagtgcacggcgtgtgcggcggcgagcatttaggttaaaaaaatgcccggttgtgaaaagcaaccgggcatcattgtgaattcactcttacctgatgtggcgaaaacgccttatccgcctacaaacgcatgaagattcaacatgttgcaatagattttgtaggcctgataagcgtagcgcatcaggcattgagcacctaatgccggatgcgtcgtgaacgccttatccggcctacaaacgcacgaagattcaacatgttgcaatagattttgtaggcctgatgagcgtagcgcatcaggcaattctactttacttcgctttggcggtttcttcgccgaccagacctatcttcaggtaacccgcctgatgcagcgtatccattaccttcatcaacgtctcgtaatcgacggttttgtccgctcggaagaagatggtggtgtctttcttgccttcggttaacgcattcaacgccgtaatcattgtttcatcggtgaccggatcgttaccgataaacatgctgttgtctgccttcacgctcagataaaccggtttttccgggcgcggctgcggcgtgctggtagaagcaggcaagttcaccttcacatctaccgtcgctaacggtgccgccaccataaagataatcagcagaaccaacatcacgtcgataaacggcgtcacgttgatatcatgcatttcgccgttatcgtcgaggttttcgttaagatgcattgccatcggatattatcctgcgcgtaatttttgtgcgacacgaaccggatgcgcagcggcgctggcttccagatccaggtcacggctttgcagcaacaatacctgcgctgcaacatcacccagcatcgctttaaagccgccaatctggcgtgcaaatacgttatagataacgaccgcaggaatcgctgccacgaggccgattgccgttgctaacagagcttctgcgatacccggcgcaacgactgccaggttagtggtctgcgtttgcgcgataccaataaagctgttcatgatgccccagaccgtaccaaacagaccaacgaacggagaaatcgcgccgatggttgccagatagccgttaccgcggcccatttgacgacccactgcggcgacccgacgctccagacggaagctggtacgttctttaataccttcgttatcgtcgctgccttcactcagttccagctcattctgcgcttcattgagcaaatgcaggcttaagcttttgctaccaaaatcagcggcgatatcgttggcctggtttaaggaacgcgcttcagccagcagttgctgctcgcgcttaaggcgacgcttctgattgaagaactctacgctcttactgaagaagattgcccaggtgactacggaggccaaaataagcccaatcatcacgcacttaacgacaatatcggcgtgctgatacataccccagacggaaaggtccgtctgcattaaattattacccactgtgtatctccaggacgcaagtcacaaaatctgcgcataataatatcaaaacgacgtcgaattgatagtcgttctcattactatttgcatactgccgtacctttgctttcttttccttgcgtttacgcagtaaaaaagtcaccagcacgccatttgcgaaaattttctgctttatgccaattcttcaggatgcgcccgcgaatattcatgctagtttagacatccagacgtataaaaacaggaatcccgacatggcggacaaaaagcttgatactcaactggtgaatgcaggacgcagcaaaaaatacactctcggcgcggtaaatagcgtgattcagcgcgcttctagcctggtctttgacagtgtagaagccaaaaaacacgcgacacgtaatcgcgccaatggagagttgttctatggacggcgcggaacgttaacccatttctccttacaacaagcgatgtgtgaactggaaggtggcgcaggctgcgtgctatttccctgcggggcggcagcggttgctaattccattcttgcttttatcgaacagggcgatcatgtgttgatgaccaacaccgcctatgaaccgagtcaggatttctgtagcaaaatcctcagcaaactgggcgtaacgacaagttggtttgatccgctgattggtgccgatatcgttaagcatctgcagccaaacactaaaatcgtgtttctggaaagcccaggctccatcaccatggaagtccacgacgttccggcgattgttgccgccgtacgcagtgtggtgccggatgccatcattatgatcgacaacacctgggcagccggtgtgctgtttaaggcgctggattttggcatcgatgtttctattcaagccgccaccaaatatctggttgggcatagtgatgcgatgattggcactgccgtgtgcaatgcccgttgctgggagcagctacgggaaaatgcctatctgatgggccagatggtcgatgccgataccgcctatataaccagccgtggcctgcgcacattaggtgtgcgtttgcgtcaacatcatgaaagcagtctgaaagtggctgaatggctggcagaacatccgcaagttgcgcgagttaaccaccctgctctgcctggcagtaaaggtcacgaattctggaaacgagactttacaggcagcagcgggctattttcctttgtgcttaagaaaaaactcaataatgaagagctggcgaactatctggataacttcagtttattcagcatggcctacagctggggcgggtatgaaagcttgatcctggcaaatcaaccagaacatatcgccgccattcgcccacaaggcgagatcgattttagcgggaccttgattcgcctgcatattggtctggaagatgtcgacgatctgattgccgatctggacgccggttttgcgcgaattgtataacattgccacttttggacaattttgcagacattttattgtgaaaagtcttaaattgttgcgtccgggatcaaggcgtcccggacgattcaggagtacaataggcagataaaggcttaaacgctgttccacaggaaagtccatggctgttattcaagatatcatcgctgcgctctggcaacacgactttgccgcgctggcggatcctcatattgttagcgttgtttactttgtcatgtttgccacgctgtttttagaaaacggcctgctgcccgccagttttttgccaggcgacagcttgttgatactggcaggcgcattgattgcccagggggttatggattttctgcctacgattgcgattctgaccgccgcagcaagtctgggctgctggctaagttatattcaggggcgctggttagggaataccaaaacggtgaaaggctggctggcacagcttcctgctaaatatcaccagcgcgccacctgcatgtttgaccgccacggtctgctggcgctgctggctggacgttttcttgcatttgtccgtacgctgctgccaaccatggcgggaatttccggtctgccaaaccgccgcttccagtttttcaactggttaagtggattgctgtgggtcagcgtggtaaccagttttggctatgccttaagtatgattccgttcgttaaacgccatgaagatcaggtaatgacgttcctgatgatcctgccaattgccttgttaaccgctggcttgttaggcacgctgtttgtggtgattaaaaaaaaatactgtaacgcctgacgattttccccgttcccggttgctgtaccgggaacgtatttaattcccctgcatcgcccgcattcttgccgcatcttcccccggcgtcacaccgaagtaacgtttaaactcacggctaaattggcttgcgctttcatagccgacgcgcatcgctgctgcgctggccttcatgccgtcatggatgatcatcatccgcgccttatgcagacggtaattcttcaaatactgcaacgggctggtactggtgacagacttaaaattatggtggaacgcgcttacgctcatgttggcttctgccgccagttgctcgacgctcaggttttcggtgtatttattctcaatccgtttcagcacgcggctaatcagactgaagtgagtctggcgactgaccagcgccagtaacgcgccgccgcaaggtccggtcagcacgtagtacagaatttcgcggatgatctgtttgccgagaatacgcgcatccagtggtcgctccatcacgtcgagtaaccgctccgccgcgcataaaatctcttcacttaacgtggcggagttaatcccgctggctgccatgctcggctggaaatgctcatcttcgccaatgtccatcaacagttcctgtaactgcaaaatatcgacattgagacgcaaccctgccagcggcacctcactcgtggcataggtttcgcactcaaacggcaacggcaccgtcagcagcaggtattcattggcatcataacgaaacacgcgttcattgatataaccgattttatgcccggaaaagagaattatgatgccaggctcgtacatcaccggtgtacgtgcgaaaggcgtctcgccatacaacaaacgcacatcgggcaacagtccactcaaactattttctttatttttcagtttattaactttatccgccagcaagcggcaaatctcttcacgtttcatatcgcgtaatttcttaggaataatgcggcaattactttgtgcgcaattttgtagcatttctccagcactctggagaaataggcaagacattggcagaaatgagcattgagagccagggcgctggcgatcacaatgaaaaacatcaggcagatcgttctctgccctcatattggcccagcaaagggagcaagtaatgaacaactttaatctgcacaccccaacccgcattctgtttggtaaaggcgcaatcgctggtttacgcgaacaaattcctcacgatgctcgcgtattgattacctacggcggcggcagcgtgaaaaaaaccggcgttctcgatcaagttctggatgccctgaaaggcatggacgtgctggaatttggcggtattgagccaaacccggcttatgaaacgctgatgaacgccgtgaaactggttcgcgaacagaaagtgactttcctgctggcggttggcggcggttctgtactggacggcaccaaatttatcgccgcagcggctaactatccggaaaatatcgatccgtggcacattctgcaaacgggcggtaaagagattaaaagcgccatcccgatgggctgtgtgctgacgctgccagcaaccggtagtgaatccaacgcaggcgcggtgatctcccgtaaaaccacaggcgacaagcaggcgttccattctgcccatgttcagccggtatttgccgtgctcgatccggtttatacctacaccctgccgccgcgtcaggtggctaacggcgtagtggacgcctttgtacacaccgtggaacagtatgttaccaaaccggttgatgccaaaattcaggaccgtttcgcagaaggcattttgctgacgctaatcgaagatggtccgaaagccctgaaagagccagaaaactacgatgtgcgcgccaacgtcatgtgggcggcgactcaggcgctgaacggtttgattggcgctggcgtaccgcaggactgggcaacgcatatgctgggccacgaactgactgcgatgcacggtctggatcacgcgcaaacactggctatcgtcctgcctgcactgtggaatgaaaaacgcgataccaagcgcgctaagctgctgcaatatgctgaacgcgtctggaacatcactgaaggttccgatgatgagcgtattgacgccgcgattgccgcaacccgcaatttctttgagcaattaggcgtgccgacccacctctccgactacggtctggacggcagctccatcccggctttgctgaaaaaactggaagagcacggcatgacccaactgggcgaaaatcatgacattacgttggatgtcagccgccgtatatacgaagccgcccgctaagctttttacgcctcaaactttcgttttcgggcatttcgtccagacttaagttcacaacacctcaccggagcctgctccggtgagttcatataaaggaggaacgtatggctaatccaaccgttattaagctacaggatggcaatgtcatgccccagctgggactgggcgtctggcaagcaagtaatgaggaagtaatcaccgccattcaaaaagcgttagaagtgggttatcgcagcattgataccgccgcggcctacaagaacgaagaaggtgtcggcaaagccctgaaaaatgccagtgtcaacagagaagaactgttcatcaccactaagctgtggaacgacgaccacaagcgcccccgcgaagccctgctcgacagcctgaaaaaactccagcttgattatatcgacctctacttaatgcactggcccgttcccgctatcgaccattatgtcgaagcatggaaaggcatgatcgaattgcaaaaagagggattaatcaaaagcatcggcgtgtgcaacttccagatccatcacctgcaacgcctgattgatgaaactggcgtgacgcctgtgataaaccagatcgaacttcatccgctgatgcaacaacgccagctacacgcctggaacgcgacacacaaaatccagaccgaatcctggagcccattagcgcaaggagggaaaggcgttttcgatcagaaagtcattcgcgatctggcagataaatacggcaaaaccccggcgcagattgttatccgctggcatctggatagcggcctggtggtgatcccgaaaagcgtcacacctagtcgtattgccgaaaactttgatgtctgggatttccgtctcgacaaagacgaactcggcgaaattgcaaaactcgatcagggcaagcgtctcggtcccgatcctgaccagttcggcggctaacatgcaaattctcccggtggcggtaatgttccgctaccggacttttcagaaatcatttattcccctcgcgtcccgcccgttgttactcttccttgttcaggaatgccaaatataaggacatcatcatgcagagccggaagctcttaaaagaacaactcatctatatccgggataaacgcaacggagaggtgaaaaacagatgaaaataatacttctgtttttagcagccctggcaagttttaccgtacacgcacagccccccagtcagaccgtagaacaaacagtccggcatatttatcagaactataaaagtgatgccactgccccttattttggtgaaaccggagagcgggcgataacttctgcgcgtattcaacaggcgcttaccctgaacgacaatcttacgctgccgggcaatattggctggctggattatgatccggtttgtgattgtcaggattttggcgatctggtgctagaaagcgttgcgataacccaaactgacgccgatcatgccgatgccgttgtgcgctttcgtatctttaaagatgataaagaaaagaccacgcagacactgaaaatggtggcggaaaatggtcgttgggtcattgacgatattgtcagcaatcatggcagcgtcttacaagcagttaatagcgagaatgaaaaaacgctggccgctttagctagcttgcaaaaagaacagccggaagcctttgttgccgaactctttgaacatattgctgattatagctggccgtggacgtgggtggtttccgactcttaccgccaggcggttaatgccttctataaaaccaccttcaagacggccaataatcccgatgaagatatgcaaatagaacggcaatttatttacgacaatccgatctgttttggcgaagagagcctatttagtcgcgttgatgaaattcgagtcctggagaaaaccgccgattccgcccgcattcatgttcgttttacgctgaccaatggcaacaacgaagagcaagaactggttttacagcggcgcgaaggcaagtgggaaatcgctgattttatccgcccgaacagcggcagcctacttaagcagattgaggcaaaaactgccgccagattaaagcaatgagctgaattaaataacaattagccggaacaataaataaaagggaacactatatgaaaacgattttcaccgtgggagctgttgttctggcaacctgcttgctcagtggctgcgtcaatgagcaaaaggtcaatcagctggcgagcaatgtgcaaacattaaatgccaaaatcgcccggcttgagcaggatatgaaagcactacgcccacaaatctatgctgccaaatccgaagctaacagagccaatacgcgtcttgatgctcaggactattttgattgcctgcgctgcttgcgtatgtacgcagaatgataaaaaaatccccggtagcgtgtcagttgccggggatattttttaacgtccaaccgccgctttaggccgtttcttcgcaccagcattcaccggacgagattgcgtagagctcgctttttttgccgtagcaggcgtctgacgctgggtcgccatcggcgtatgtttcgtcaacgccggacgggtattgcggttctggcgacgagcttcacgcatctcttcaatggttggcgcaggcactaagcaatcgcgacggctgccaatcagatgctttttgcccatcgcttccagcgcctggcggattaacggccagtttgccggatcgtggtaacgcaacaacgctttatgcaaacgacgctgtttgtcgcccttcggtacgaagacgtcttcgctcttataaccaatcttcgccagcgggtttttcccggtgtaatacatggtggtactgttcgccagcgggctcggatagaagttctgcacctggtcgaggcggaagcggtgctttttcagccacagcgccagattcaccatatcttcatcacgcgtaccggggtgcgcggagatgaaataggggatcagatactgctctttacctgcctgtttactgtaagtatcgaacagctctttaaagcggtcatagctgcccatgcccggcttcatcatcttgcttaacggcccttcttcggtatgttccggggcaatcttcagataaccgccgacgtgatgggtcgccagttctttgatatagcgcggatcttctacggctatgtcataacgcacaccagaggcaatcaggatctttttaatgcctttcagatcacgcgcacggcgatagaggttgatcgttggttcgtggttcgtgtccatgtgcggacaaatatccggataaacgcagctcaaacggcgacaagtttgttcagcgcgtgggcttttgcagcgcaacatatacatgttggcagttggcccaccaagatcggaaatcacgcccgtaaaacctggaacggtgtcgcggatcgcttcgatctcattaatgatgctatcttcggaacggctctgaataatgcgcccttcgtgctcggtgatagaacagaaagagcagccgccaaagcagccacgcataatgttgacgctaaaacggatcatttcgtaagccggaatacgggcattgccataggccggatgtggcacgcgcttgtatggcagcgcaaaaacgctgtccatctcttcggtagaaagcggaatagcaggcgggttgatccacacatagcggtcgccgtgtttttgcatcaatgcgcgggcacagcctgggttggtttcgtggtgcagaatacggctagcatgggcgtacagcactttatcgcccttcactttctcgaaagaaggcagcaacacgtaggttttttcccacggtttcgggcgcggtggctgcacggttacggctttggcttcctgctttttcggtgccaccggtttgttatccgcgcacggcaaatcttcaccatacggatgcgggattgggtcgatttttccaggggtatcaagacgggtggaatccacgccgctccagccaggcagcgcctctttcacgataatcgcggtattacgcacatcgcggatttcactaattggctcgcccatcgccagacgatgcgccacttccaccagcggacgctcaccgttaccaaacatcagcatgtcggctttgctatccaccagcacggaacggcgcacggtatcggaccagtaatcataatgcgcggtacggcgcagactagcctcaataccgccgaggatcaccggtacatctttccacgcctctttacaacgctgggtataaaccagtgtggcgcgatccgggcgcttacccgcgacgttatccggcgtgtaggcatcgtcatgacgtaaacggcgatcggcggtataacggttgatcatgctatccatgttgccagcagtaacaccgaaaaacagattcggtttacccagacgcataaagtcgtctttgctgctccagtccggctgggcgatgatcccgacgcgaaagccctgcgcttccagcatacgaccgcaaatcgccatcccgaagcttgggtgatcgacatacgcgtcgccagtaaccaaaatgatgtcgcagctatcccagccaagttgatccatctcttcacgagacatcggcaaaaacggtgccggtccaaaacaggcggcccagtactgcggccaggagaacaggtcgcgatccggttggatcagggagatagagctcattttgcttccagaaatgataaaaaaataatcaaaggccggggattataagccggaacgaaagagaaatcgaaaggtattccatactcgccctcctcgggcgagtatgaagattacggtaccggattgaccaacagttgcccaatgctgccacggtccgccatttccagcgtctgactgttgaagtagaacgggaagtgcgcccaggaaggctgaccgaaataaacaagcagctccacttgtccgtcaacccaaacggtatctttccagcctctgtcttccgggaacggcatcgcgccattcacgttacggatctggaacattacgccttcaatatggaacgcttgcggctcgtccgcgcgtaccgtccagcgttcccacgttccttgctgcgcggtgacatcaatacggttgacgtcccacagctgtccattaatacccgggtcatcacccagactgatatcgcgactgcgaattgggctaccagccatgatttcagttggcagcaagcgcatcggaagactgtctgtgaccagcggcagaaggccggttgggcgcagcgttagcaccagggtagaaaccagaatactggatggctcaaagaagccacgaatacgatcaacaatgctcgccgcttcgccacaggtgatgctcacttcatcgccgttgctcatatccaccagaatctcgcggcgctcgcccggtgccaggctaagttgcttcacgcttacaggagcaggcaggaatccctgatcgccagaaatcacatgtaacgggcgaccatcgttcatctgtagttgatagcgacgagagttgctcgcgttcagcagtcgcaagcgcacccagccacggctgacttcaacgtacgggctttgtacaccgttaaccagcagcgtatcaccaacaaagccgccgcttcccggttcgttgtattctggcgtaccaaagttatccagccgtttatcctggataatgaccggaaaatcatccacaccataatggttggggataggcaggctcttgctgacttcatcttccaccagccacattccggcaaggccgttatagacctgctgagccgtgcggttgggagtattggcgtgataccacagagtagctgcgttctggcgaatgggcagtacgggtgcccagtcagcgtttgggctcatcatccgtgccggaccgcccatcagcgggcctggtacctgtagcccggccaccgtcatactgacattttctgtcaggcggttgctgtaaataagcttaacatcgtcgcccttccagacgcggatagtcggccccaggtaacgaccattgattccccagacgctcgcgcgtgtccctggcgtaaaactccagtgcgcacgttgtacagtcataaacagcggttgcccacggcgagattcaagtagcggcggaacgggtagcggttgctgttgcccggctgcgctggccttcaggggaacagcgcctgcacaaagtgcaatcccgcttgcctgaatgaactgacgccgactgagactcatatttgctccatgtaaaactggctaaagtaataccgtgcaggaaagtgttccccgcaaaaatacagattgccgacttaaacttttccggcggcttcgcgttctgcgacttctttatcgagctcggcgattttttgttccattatgctacgacaatgggcagccagctcacgaacctgatctttgccatactgactgacgtcaattggcggcagcatttcgacaatcaccagaccgttgtgcagtcgattaagattaatcttattgctagttgtagagacgcacacgggaataatcgggacgcccgccgcaattgccgcgtgaaatgctccagtcttgaacggtagcaggccgcgaccacggctgcgggttccttccgggaacatccagatggaaatacggcgttttttgaagtgattcactacttccgcaatggtgccgtgagctttagtgcgattgtttctgtcgatcaataagttgccggttaaccagtacaactgcccgaagaaggggatccacagcaagctctttttacctaccgtcaccgtcggcggttgcacgatgttgcttgctgtcaccatgtcatagttgttctggtggttagcgatatagatagcattgccgtagctttcagcgtctgtaggtttacggcactcaactttcaggccaaacagcggcgcaagacggccaaacatatgcccaaaggtggccacatgtttcgggttacgcgggctgaaaaggcagtaaatggagccgaatacacagactaagatgctgtaaatcacggtaataataagacgaaagatatatagcataacaccctctgaaggtctgagagactggcattgtacgtcacctgaaatcaggttagggcattgttaaaagccgctctctggaaaagcgtattgttaatcgcaacgcatgaataaacaacggtttcaagggaatttttatcgtttccgggggttgaatacgctgccggatgacgacttaacgtttcatccggcgttccttgcaagcgggaggaaacagcgccctccccggcatattactcttcgctatcaccgctgctggcacggcgaggagagtcgatctcaacacgatcgatacgctgcaaaccgcgcatcaacgtaccgcggcgtccacgttcgccagtgactttctgtaactcttccgggcgcagtttaattttgcgtttcccaacatgaatggtcagcgtgctttgcggcggcagaacgtacaattgcgccagaccatcttctccacgcgcggcttctgcgcttggaatgttgataatcttgttgcctttgcccttgctcagctgcggcagatcacttaccgggaacatcaacatacggcctgcctgagtgattgccagcagcatatcggaagcatcttcaatcaccaccggcggcataacatgggcattttccggtaaggtgatcaaagccttacctgcacggttacgcgccaccagatcgttaaaggtgcagacgaaaccgtaacccgcatcggaagccatcagcagtttctgatcgtcgctttccatcagcatatggtcaacggtcgccccaggcggcaacgttaatttgccggtgagcggctcgccctgaccacgcgcgctcggcagcgtaatcgggtcaatggcatagctacgaccggtggaatcaacaaacactaccggttggttgctcttacctttcaccgccgctttgaagctatcacccgctttataattcaggcccggcgcgtcgatatcatggcctttagcgctgcgtacccagcccatctggctcagcacaatggtgacaggttcagacggcagcatgtcgtgctcgctcatcgctttcgcttcttcgcgttcctgcaacgggctacgacgatcgtcaccgtaggcttgcgcgtctgcctgcagttctttcttcagcaggttattcattttacgctcggaagccaaaatgccctgcaactggtcgcgctctttttccagttcactctgctcaccgcgaatcttcatctcttccagtttggcaagatgacgcagtttcagttcgaggatcgcttccgcctgggtttccgtaaggccaaaccggctcatcagcgccggtttcggttcatcttcattacgaatgatctcaatcacttcgtcgatattgagaaacgccaccagcaaaccttcgaggatatgcaggcgcttgaggactttctccagacgatagttcagtcggcggcgcacggtatcgcggcggaacaccagccattcggagaggatttccagcaggtttttcaccgccggacgaccatccagaccgatcatattaaggttaatacgatagctcttttccagatcggtggtagcgaagaggtggttcatcacctgatccatatccacgcggttggaacgcggcacaatcaccaggcgggtcgggttctcgtggtcagattcatcgcgcagatcgtcaaccatcggcagctttttgttgcgcatttgcgcagcaatttgctccagtacgcgcgcaccactaacctgatgcggcaatgcgctgataaccaccgcgccatcttctttcttccacaccgcgcgcatacgcacactaccacgtccgttctcgtagattttacggatctcggcgcggctagtgataatttccgcttcagtcggataatccggcccctgcacgatatccagcagctgatcgagcgtggttttcggctggtcgattaatgcgattgccgcctgagccacttcacgcaggttatgcggtggaatatcggtcgccatgccgacggcaataccggtggtgccgttaagcaaaatgtttggcagacgggcaggtagcattttcggctcctgcaaagtgccgtcgaagtttggcacccagtcagccgtcccctgccccagctcgctcaatagcagctcggaatatttgctcaaccgggattcggtgtaacgcattgccgcgaagcttttcggatcgtccggcgcgccccagttcccctgaccatcaaccagcggataacggtaagagaacggttgcgccatcaggaccatcgcttcataacaggcgctatcgccgtgcggatggtatttacccagtacgtcaccgacggtacgggcgctttttttaaatttggcgctggcattcaggcccagttcagacatcgcatacacaatgcggcgctgaacaggtttcagaccatcaccaataaacggcaacgcacggtccatgatcacgtacatggagtagtttaagtaggcgttttccgtaaattcatgtagcgcaaggcgctctgccatatcgctcattaattctgattcctcaacttattcgccagccttcaaaggggcaatattgccggagatactacattatctgccgcgtcgagtcacaggagatcaacgtgaatagcgccgccggacgtgctccgacggcgataaaggcatcaatgtgccttgatatacaactctttgctgtagacataatcctggggattatgcagcggaaaaccgccaacgtagggtttaagcagtttgattaacggctgatagtagataggaatcagcggtgcctgttggttgatgatcacttctgcctgctgatacaacgcattacgctttgtcgcatcagtgatctgcgtggcctggtttagtaaggcgtcatactgcgcatttttccagtgaccgacgttttcttcactatcgcttttgagcgtgttcaggaagctggaagcatcattgtacgtcgcatcccagctctgccgagacagcatgaaatcaccggctcgtcgggcatcaagataggttttccactccattgtgcgcagcgtcacctgtgcacccagccattttttccattcggaagacaacgctatcgcggtcttttcatgcagatcgtacttgttgtagaacagctcaaagcgtagcggatgagaggcgtcgtatcccgcctgtttcagcaaggcttttgccatcgcgacgcgctcactcattggcttttgcagttcatcgaacgtcgtcgcgctaaagccttttacctctggcggcgtcagcgtggttgcgggcgttctcaaccccagtaccttttgcgcaataagctgtcgatcaaccgtaagatatagcgcccgacgcactcgcacatcgttaaatggcggtttctcaaggttgaagttgtaatattcgctgttcagacgcggaataattcgtagctcgccaggcagacttttttcaatggcgggaatttgctgcgccggaacccaggtgagatcgacctctcccgcgcgatagcggttatagccggtgacgctattatctagcgccagatactcaacctgttgcaatactgtatgttgcgcatcgcggtactttggatttttgcgtgcagtaatcttttcgttaactacccactgatcaagcacaaaggcaccgttgtaaaccatgttctctggcttactccagctatcgccatgtttagcgatgacatgatgaggaaccgggaacagcgtcggccaggcgagcatcgtcgtgaaccaaggaaccggctgctcaagcgtaacttcaagagtacgatcatccgtcgctttgacacccaggcttgtaacatctgctttacccgcaacaatagctgcggcattgttaatgtgcgcctgtgccagatagccagcaaaagggcttgccgttttcgggtcaaccgcgcgctgccagccgaggacaaaatcctctgccgtcagaggctgaccgtcggaccactgcaaaccgctacgcagatggaaaatatagcgcttgccgccgtccagtatctcccagcgttcagcctgagcgggctgcacctggccttcaccgtccatccataccagaccttcaaacagatccagcacaatctgcgcggcagtattctcctccaccttttgcgggtcgagcgtacctgggtcgctatgattgttgtaacgaaagacttgttgcggggcgagcggtgtgttggcgggaacgtcagcagcgtagagaggagccgcacttaccaggctgaccagccataataaatttcgcgtatacatggtattccttaccggagaaattataagcccaacaacaatacgcctgtggcattgttcgctcaaacttatcgcgagtgatttggctcacactccggtaaagaaaaaagcgagttgcccccgcttttccattaattaacggatttcattcaatagttctggatgcttatccagaacacgtaaaagtttgattgtggaaggatgaggttgggcattgcctttttcgtaacggctaaacgcatttacacctcccccaaaaatttcgcttgcctctttttgggtaagagagagcttttttcgaaccttcactataaattcaggtgccactgtttcggcattcacgctagcccgaaatgcctttacttgcgccatgaaagcatcactctcttctttattcatgatgctctcttcgcaatggacacaatataaaccgtggatacctttcaatactgtttttcgtccacggaaggtgtatggaatatctttaatgccagaaaccatttctccctggtggcaaaccggacatttcatattacttctccttaaagctgacgatcagtacgtcatgaattaccgtaattttaagataaacctggcctgtaacaagcctgggtctgtaaacatcctgccagatagtatgatcagagtaggtggtcatgcttttataaaagtcgctctcacttaatccaatgataacattacacataccatcaaaatccaaacctaactcatctgcatttaacagggcactacgtgttgtacgaacttgcccggcattgacaagttttttaacctgactcaaacgtgtatgtggtgtgcgtttttccataacccccgcctccctgttactttagttataacctaaaaggttaattacagcaatgaaaaagcacctaaaaggttagttagatgtacggagatagtgaccacacaaaacgtattctttaaggaaagtgattgaccatataagaaagtggcgcattagtagcgccagtttgaagcaggaatttataagggaagctggagtcaggcatcacgccaacggcacataaacatccgtttccagtcgctgctctgtcaccccttcggcaagattggtgtagtgaaacagaatcggtgctttacgcattttctcgccgcttgcaggcagccagtggcgaatgatgccccataccgtgtgactaatatcgtccagctcgccaacgtggcgggccacggcataacgtccaccggtaagttcaccattgctcacaccataacgattatcgggaatcggttcgctaacgctgccgcagatatcaaagcgaaacgcttccggtgcggtggtggcagggtcgtcccaggcgacgccaaaagtctggctttggttaacaggagaaagccccgtctctttacgccacatgataaatttcgccacgctgtagttgagcaattcagggctacagcggtgcggcaacatcgccacaggtatacttgggaaatcgataatgtttacatccagtgtcaggtttgtcattttgcctccctgcgaaattattcccgggaacgcgtcccgggagcggtaacaattacggatttactttgcggatctgtttgacgtcaatttcaacagaattccagtctttatcgacttcaccctgaatctcaaccgtatctttcggcgtcaccgtcacgccgttccagcgtttgtggtcgatatcaacattgatagtaccgctggcatctttgaacacgtagagatcgtcagagatgcgttcaacgatattgccgcgcagggttacccaggtgtcgtcacgcagggattttgcgctttctacagtcgttacgctgccgttcggcccctggaatcctccggcctgactttgcgttgcgcttgggccagaaaaaccgccctgctctgctgccatcaccggtgcgctgcacagggccattactgcgattactgctgcgaattttttcatgtttattactccctttaatgtctgtttccgagcatttaacaagatagtccttaacaacttcttaagggaaaaaaataaaatttagtgctgtacagagcgcgttacaacacggtttactggcagcaaatacggttatcgcagggatgaaaaaatgcgaattttactgatagaagatgacatgctgattggcgacggcatcaaaacgggccttagtaaaatgggttttagcgtcgactggtttacacaaggtcgtcagggaaaagaggcgctttatagcgcaccttatgatgcggtgatcctggatttaaccttaccaggcatggatggtcgcgatattttgcgcgaatggcgagaaaaaggtcagcgtgagccggtactgatcctgaccgcgcgcgatgcgctggcggaacgtgtagaagggctgcgtctgggagctgacgattatctgtgtaaaccttttgcgttgatagaagtcgccgccaggctggaagctctgatgcgccgaaccaacggccaggccagcaacgagctgcgccacggtaacgtcatgctcgaccccggcaaacgtatcgccacgctggctggcgaacccttaacactgaaaccaaaagaatttgccctgctggaattactgatgcgtaacgctggtcgggtactgagccgcaaactgattgaagagaaactgtatacctgggacgaagaggtcaccagtaatgccgttgaagtgcatgtgcatcatctgcgacgcaaactcggtagtgattttattcgtaccgtgcatggtattggttacacattaggtgagaaatgaaatttacccaacgtcttagtctgcgcgtcaggctgacgctaatctttttaattctggccagcgtgacctggctgctttccagctttgtcgcctggaaacaaacaacggataacgtcgatgaattgttcgacacccaactgatgctgtttgccaagcggttaagtacgctcgatctcaacgaaatcaacgcggcggatcgcatggcacagacgccaaatagattaaaacacggtcatgttgatgacgatgcgctgacctttgccatctttacccacgacggcagaatggtccttaatgatggcgataacggagaagatattccctatagctatcaacgggaaggttttgctgacgggcaactggtcggtgaagacgatccttggcgttttgtctggatgaccagtcctgatggcaaatatcgcatcgttgttggccaggaatgggaataccgtgaagacatggcgctggcgattgttgccgggcaattgatcccgtggctggtcgcactgccgattatgttaatcatcatgatggtactactgggtcgtgaactcgcgccgctgaacaaactggcgctggcactacgtatgcgtgaccctgacagcgaaaaaccactaaacgcgactggcgtacccagcgaagtgcggccactggttgagagcctaaatcaactgttcgcccgcacacatgcgatgatggttcgtgaacgacgctttacctccgacgcagctcacgaacttcgtagcccgttaacggcgctgaaagtgcaaaccgaagttgcgcagctctctgacgatgatccgcaggcgcggaaaaaagcactgctccaattacattccgggatcgatcgcgctactcgtctggttgatcaactgctcacgctaagccggctggacagtctggataaccttcaggacgtcgcggagatcccgcttgaagatctcctgcaaagcagcgtgatggatatttaccacacggcgcagcaggcgaaaattgacgtgcgactgacactcaatgcccacagcatcaaacgcaccgggcaaccgctattgctaagtttgttggtgcgaaatttgctggataacgccgtgcgctacagtccacagggcagcgtggtagacgtcacgctgaatgctgataatttcatcgtgagggataacggccccggtgtgacaccagaggcactggcgcgaattggcgaacgcttctatcgcccacccggacaaaccgctaccggcagcgggcttgggctaagcattgtccagcgaatcgccaaattgcatggcatgaatgttgaatttgggaatgcggaacaaggtggatttgaggcgaaggtaagctggtaacttctctgtctatgagagccgttaaaacgactctcatagattttattaatagcaaaatataaaccgtccccaaaaaagccaccaaccacaaaccagacaaataccgaggctgaatacatatacccaaaactcgaacatttcccgcataaagagttttcttaagataagaataataagtggcgtaagaagaaaaaatgctgcaatcattgcttgcaatatacgatcttcgccactaacggaaggtatactgcaaatatttcctccgctctcaagcatccagtcatacttattgaaagcaaaaaaagaatctattaaccaataagtaagcattatatatagcaatgcttcaaatattgttttaattttctgctttaacatatatcagtacgctcataaaaatccatttataattatcaacatgacacgttgatactttcatcttttacttattcaaagccatattttcaatccccaaaaaaaccgaaccaaacgtgtaaattattccggtgcgagtaagaattatgaggaatggctatcagtattgtcattttcagaaaatatttatcctgcatcggtgagtcagagtaagatcagacttttgctaaattcgcaaaagactttgcacattttgctaatttcaccgtaccgctctgtgacgtactatagtcggcaaacgtctcaccttgaggttaaaaaatgagcaacatcctgattatcaacggcgcgaaaaaattcgcccactccaatggtcaactgaacgacaccctgaccgaagtcgcggatggcacactgcgcgaccttgggcatgatgtccgcatcgttcgcgccgacagcgactacgatgtcaaagcggaagtacaaaactttctctgggctgatgtggtgatctggcagatgccaggctggtggatgggcgcgccgtggacagtgaaaaaatacattgatgatgtattcaccgaaggtcacgggacgctgtatgccagcgatggtcgtacccgcaaagatccgagcaaaaaatacggttccggcggcctggtacagggcaaaaaatatatgctttctctgacctggaacgcaccaatggaagccttcaccgaaaaagatcagttcttccacggcgttggcgttgacggtgtgtatctgccgttccataaagcaaaccaattcctcggtatggaaccgctgccgacatttatcgctaatgacgtgataaaaatgcctgatgttccccgctatactgaagaatatcgcaagcatcttgtggaaatttttggttaactagagctcaggctttagaaggagttaaccatgcttaccgtaatcgcagaaatccgtactcgtcctggtcaacatcaccgtcaggcggtattggatcagtttgctaaaatcgttccaaccgtactgaaagaagaaggttgccacggctatgcgccaatggtggattgcgcagctggcgtgagtttccagtctatggcaccggattctatcgtgatgattgagcagtgggaaagcatcgcgcatcttgaagcgcatctgcaaaccccgcacatgaaggcgtatagcgaagccgtaaaaggtgacgtgctggagatgaatatccgtattctgcagccagggatttaatcctgccttgtttgcccggccatcctgaccgggcaatgttctttcctttaaacctcaatctccgccatgtcgcctttctcttgcaaccagttgcggcgatcttcgctgcgtttcttcgccagcagcatatccatcatcgcgtcagtacgctgatcgtcttcatcatcgatagtcaactgcaccagacggcgagtgttcggatcaagcgtggtttcgcgcaattgcatcgggttcatttcccccagacctttaaaacgctggacgttcggcttgcctttcttgcgttttaattgctcaagtacgccctctttctcttcttccgtcagcgcgtaataaacctctttcccgagatcaatacggtagagcggtggcagtgcgacgtaaacgtgaccgtgtttcaccaacgcgcggaaatgttttacgaacaaagcgcagagcagcgtggcaatgtgcagaccatcagagtccgcatccgcgaggatacagattttgccataacgaagctggctcagatcgtcgctgtcaggatcgataccgatcgctacgctaatatcgtgcacttcctggctagccagcacttcgtcggaagagacttcccaggtgttaaggatcttacctttcagtggcatgatcgcctgatattcgcgatcgcgcgcctgcttggcagatccgcctgcggagtcaccttccacaaggaacagctcggtacggttaaggtcctgcgcggtacaatcagccagtttgccaggcaacgccgggccgctggtcagctttttacgcaccacttttttggccgcacgcatacggcgctgggcgctggaaatcgccatctccgccagcagttcagccgcctgaacgttctggttcagccacaggataaaggcatctttcaccacgccagaaacgaatgccgcgcattgacggctagagagacgctctttcgtctgcccggcaaactgcggatcctgcatttttacactcagcacataggcgcagcgatcccagatatcttccgcgctcagctttacaccgcgcggcagaatattgcggtattcacagaactcacgcatcgcgtccaacaggccctgacgcagaccattaacatgggtaccgccctgcatcgttgggataaggttgacgtagctttcggtcagcagttcaccgccttccggcagccacagtagcgcccagtccacagcttcagtatcaccagcgaaattaccgataaacggtttttccggcagcgtcggcagaccatttaccgcttccgccaggtaatcattcagaccgtcctgatagcaccagcgttgttcggtattgttgatctcatctttaaaagtgatctcaacgccagggcacaataccgctttggctttcagcacatgcgtcaggcgactaacagaaaatcgcgggctgtcaaagaaggtttcatccggccagaagtgcacactggtaccagtattgcgtttaccgcaagtgccgacaacctgtaaatcctgcaccttttcgccattttcaaaggcgatgttataaacctgaccatcgcggcgcacgttaacttctacgcgcttgctcagggcgttaaccacgctaatccccacgccatgcaggccgccagagaactggtaatttttgttagagaatttaccgcctgcatgcagacggcaaagaatcagttcaaccgccggtacaccctcttccgggtgaatatccaccggcatcccgcgcccatcgtcaataacttctaagctctggtcagcatgtaaaataacgtccacgcgttttgcgtgacccgccagtgcttcatccacactgttatcaatgacttcttgccccaaatggttagggcgagtggtatcggtatacatccccggacggcggcgaaccggctcaagcccggtgagtacctcaatggcatcagcgttataagtttgcgtcatggtttaagttagtaattcgagttgatcgtcagagatggtgcagaccaagaaaatcgacgatcgggttgaaataatcttcgaagcccgtgaatgcgtggttgccgccttctatgacagtctggcggcaggaagcgtagtacgccaccgcctggcggtaatccagcacttcatctcccgtctgttgcagcagccagatcaaatccggcgcttccagcgggtcaatctgcatgactttaagatcgtaaatatggcgactctctagcacatattgctgcccggtgtaggggttctcgttctgaccgagatagtccgtcagcagttcaaacgggcgcaccgccgggtttaccaccactgcgggcagcataaaacattgactcaaccaggtggcgtaatatccccccagactgctaccgacaatacccaggctatcaccgccatgttccaggacaatggattccagcagctctgccgcgtcggaaggatacggcggcaactgcggaatgatcatctcaacgtcagggtgatgttccgccagccagttttttaacaagctcgcttttgcagagcgcgggctgctgttgaaaccgtgtaaataaagaagcgtagacatcagtagccttcactagcggtatcaggttggaaacgtgtgtccgccaggcgatgcacctcggtggtcagcgtgccatcagcatgtaactcgagagtacgccagccgggcgcgatggtatccagcgtaaagttggaacagtgcggcttaaactgcacacaggtgctcggcgttgccagcaggcggcgaccattccagtcgagatccagctcctgatgaatatgaccgcacagcaagtatttgacgtgcggaaacttcgccagcacggtatccagttcgcccgcgttacgcagactgtgttgatcgagccaactacaacccgcaggtagcggatgatgatgcagcagcagcaacgtatggcgttctggcgcatcggccagtttacgttccagccactcaagctgaaactcgctcagctcaccgtgcggcacgccaaacacctggctatccagcaacaggatttgccattgctcaccaataaacacgcgcttcgccggggagatacccgcatcctgtaacgcgctgtacatcgcgggctggaaatcgtggttgcccggcagccagacgcagggcgcacgaaaacttgcgatgccttcagcgaaatgctgataggccgcagaggattgatcctgcgctaaatcacctgtcgcgacaatcaggtcgaattcgtgctggtgtggccgaatcgcctccagcaccgcctggtaactctcccaggtgtttacccctaacagggcttcgtgcttttgtgcaaacaggtgagtgtcggtaatttgtaaaatcctgactctggcctcaccagccagaggaagggttaacaggctttccaaatggtgtccttaggtttcacgacgttaataaaccggaatcgccatcgctccatgtgctaaacagtatcgcaaccagtccgctaaaaactgattaatttgatgcttttcgtcgcgttgatgcaactttttattaggataatcataccgcgctttgaagcgaaaaatctgctggctactacacacttcagccaccatcgcgtcatgatacagacgcaccgtcatactcggaaggctccagtaactgatcgcgggcgcagtctgttctattgtcaccagggtagtgtatcgggtgctttccacaatcgtcagccgatattgtgcgtttgccacctgatagcttacagtttcgccgggtgcgtcattgcgcggtaacaaacggcgcaattgactaaagttcatctcgcacaggcgcatcatttcaggaaagtcaggtgtgtaacgcttcatttatgcccactcattttttaacgcttgatgatgcagctgcagccattgcaaagcgatgacgctcgctgcgttgtcgattttcccctcttctacccactggtatgcctgttcccggcttaccacatgaacgcgaatatcttcgttttcatcagccagaccgtgaataccgcttgcggtcgtggcgtccacttcgcccaccataatactgctacgctcactggtgccccccgggcttgccaggaaacttaacaccggtttggtccgtttgactatcagtcccgcctcttcaatcgcttcgcgacgggcaacatcttccacactttcaccctcttcaatcatcccggcaaccatctccagtagccaaggggtttcgctggtgtcgtacgcggcaatccgaatctgctcaatcagcacaacttcatcacgcactgggtcaaagggtagcaagactgcggcgtgaccgcgctcaaaaatttcccgccgcacctcatgactcatttgcccgttgaatagacgatgacgaaatctataaagatctaaactaaaaaagccgcgataaagtgtttctcgtgcaataatttctacatcgtttttgccaaatgtaacgggcaggttgtctggcttaagcattgttaatgtcctggcactaatagtgaattaaatgtgaatttcagcgacgtttgactgccgtttgagcagtcatgtgttaaattgaggcacattaacgccctatggcacgtaacgccaaccttttgcggtagcggcttctgctagaatccgcaataattttacagtttgatcgcgctaaatactgcttcaccacaaggaatgcaaatgaagaaattgctccccattcttatcggcctgagcctttctgggttcagtagcttgagccaggccgagaacctgatgcaagtttatcagcaagcacgccttagtaacccggaattgcgtaagtctgccgccgatcgtgatgctgcctttgaaaaaattaatgaagcgcgcagtccattactgccacagctaggtttaggtgcagattacacctatagcaacggctaccgcgacgcgaacggcatcaactctaacgcgaccagtgcgtccttgcagttaactcaatccatttttgatatgagcaaatggcgtgcgttaacgctgcaggaaaaagcagcagggattcaggacgtcacgtatcagaccgatcagcaaaccttgatcctcaacaccgcgaccgcttatttcaacgtgttgaatgctattgacgttctttcctatacacaggcacaaaaagaagcgatctaccgtcaattagatcaaaccacccaacgttttaacgtgggcctggtagcgatcaccgacgtgcagaacgcccgcgcacagtacgataccgtgctggcgaacgaagtgaccgcacgtaataaccttgataacgcggtagagcagctgcgccagatcaccggtaactactatccggaactggctgcgctgaatgtcgaaaactttaaaaccgacaaaccacagccggttaacgcgctgctgaaagaagccgaaaaacgcaacctgagcctgttacaggcacgcttgagccaggacctggcgcgcgagcaaattcgccaggcgcaggatggtcacttaccgactctggatttaacggcttctaccgggatttctgacacctcttatagcggtagcaaaacccgtggtgccgctggtacccagtatgacgatagcaatatgggccagaacaaagttggcctgagcttcagcctgccgatttatcagggcggaatggttaacagccaggtgaaacaggcacagtacaactttgtcggtgccagcgagcaactggaaagtgcccatcgtagcgtcgtgcagaccgtgcgttcctccttcaacaacattaatgcatctatcagtagcattaacgcctacaaacaagccgtagtttccgctcaaagcagtttagacgcgatggaagcgggctacagcgtcggtacgcgtaccattgttgatgtgttggatgcgaccaccacgttgtacaacgccaagcaagagctggcgaatgcgcgttataactacctgattaatcagctgaatattaagagtgctctgggtacgttgaacgagcaggatctgctggcactgaacaatgcgctgagcaaaccggtttccactaatccggaaaacgttgcaccgcaaacgccggaacagaatgctattgctgatggttatgcgcctgatagcccggcaccagtcgttcagcaaacatccgcacgcactaccaccagtaacggtcataaccctttccgtaactgatgacgacgacggggcttcggccccgtctgaacgtaaggcaacgtaaagatacgggttatctgccgcattcttcccccttcagccttcaatttcgaccagccatcctctattctgatgggtatttaccactggtcccggaagacaaaaatgaaacggacaaaatccatacgccacgcatcgttccgcaaaaactggagcgcacgccatctgacaccagtcgctctcgcggttgccactgtttttatgctggctggctgtgaaaagagtgatgaaacagtgtctctctatcaaaatgctgacgactgtagtgctgcaaacccaggcaaaagcgccgaatgtaccaccgcgtacaacaatgcgctgaaagaagccgaacgtactgcgccgaaatacgccacccgtgaagactgtgttgctgaatttggtgaaggtcagtgccagcaggcaccagcccaggctggcatggcaccagaaaaccaggcgcaggcccagcaatccagcgggagtttctggatgccgctgatggccggttacatgatggggcgtctgatgggcggcggcgcgggatttgcacagcagccgctgttctccagcaaaaacccagccagtccggcttacggtaaatataccgacgcgacgggtaaaaactatggcgcagcccagccaggccgcaccatgaccgtaccgaagacggcaatggcaccaaaaccggcgaccaccactaccgttacccgtggcggttttggtgaatctgttgccaaacaaagcactatgcagcgtagtgcaaccggtacctcttctcgtagtatgggtggctgataccgatggaaagagtcagtattaccgagcgcccggactggcgtgagaaagcccacgaatacggtttcaattttcacaccatgtacggcgagccgtactggtgtgaagatgcttactacaagttgaccctcgcccaggttgaaaagctggaagaagtcaccgccgaactgcaccagatgtgcctgaaagtggtggaaaaagtgatcgccagcgatgagctgatgaccaaattccgcattccaaaacacacctggagttttgtgcgccagagttggctgacgcaccagccaagcctttatagccgtcttgatctggcgtgggatggcactggtgaacctaaacttctggaaaataacgccgatacgccaacgagtctatacgaggcggcgttctttcagtggatctggctggaagatcagcttaacgccggtaacttgccggagggcagcgaccagtttaacagtctgcaagaaaaactgatcgatcgcttcgttgagctgcgtgaacagtatggcttccagttgctgcatctcacctgctgtcgcgacacggtggaagatcgcggaaccattcagtatttgcaggactgcgcaacggaagctgaaattgctactgagttcctctacatcgatgatatcgggttaggtgaaaaaggtcagttcacggatttacaggatcaggtaatttccaacctgttcaaactgtatccgtgggaatttatgttgcgtgagatgttcagtaccaagctggaggatgcaggcgtacgctggctggaaccggcgtggaagagcattatctccaacaaggcacttctaccgctactgtgggagatgttcccgaatcacccgaacctgctgcccgcttattttgcggaagatgatcatccgcaaatggaaaaatatgtggttaaaccgatcttctcccgtgaaggcgcaaacgtgagcatcattgagaacggcaaaaccattgaagcagcggaaggtccgtatggcgaagaagggatgattgttcagcaattccacccgttaccgaaattcggcgacagctatatgctgattggtagctggctggtgaacgatcaacccgccggaattggcattcgtgaagaccgtgcattgatcacccaggatatgtctcggttttatccacatatttttgttgaataagccacgataccggatggcactcgccatccggtaattgttagcctatctgcacgctcagcatactcaggctgcccatttctataccctcaaccggaatggtaattggctcctgcccatcccacgcacctaacacatacaacaacggcaaataatgctctggcgttgggttgcttaacgtgccaccttcatggtcgaggtaattcaccagaggatgttgttccactggcccttgccacgtcagattcgctttcacatactcattaaagctcgtcgcccacggatacggactactatcaccgtgccacttcactgtgcgcaggttatgcaccacgttaccgctggcgaccaacattattccttcatctcgcagcgctgccagtttgcgccccatttcgaaatgccaggcggcaggtttgctactgtcgatactcaactgcaccatcgggatatcagcgtcaggatacatcttaatcagcacgccccagctgccgtggtcaaagccccaggcttctttatccagcgtcaccgggatcggcgctaacagctcaaccagacgctgtgccagcgcagggctacccggagcaggataatgcgtatcgtacagcgcctgcgggaagccaccaaagtcatgaatcgtgggcggcgtctccatcgcggtcactcctgttccacgggtaaaccagtgagcgctaaccaccacaatcgcttgcgggcgtggcaatgtcatccccaacttctgccagctgcgggtatacaaattatcttccagcacgttcatcggactaccgtgacctaaaaacaatgctggcatacgtgtactagacatgatgatatccttaactaaaggtgtcattttgatatcctcacaatacgcttgttcggcggagtaagaacccggataacaatgatgatgatcatcagttattttgacgatctgcctgaaggtgaagatttataaggagttgtcgatgagtgtacctctcattctgaccatactggcgggggcagccacgtttattggcgcgtttctcggcgttctcgggcaaaaacccagcaaccgcttactggcgtttagcctaggttttgcggcggggatcatgttgctcatcagtttaatggaaatgcttcctgccgcactagcagctgaaggaatgagccctgtgttgggttatggaatgtttatcttcggtctgcttggctattttggcctggaccgcatgttgccacatgctcatccgcaggatttaatgcaaaaaagcgtgcagccgttgccaaaaagcatcaagcgcacagccattctgctcactctcggcatcagtctgcataacttcccggaagggattgccacctttgtcacggcgagcagcaacctggagctgggatttggcatcgcactggccgtcgcgttgcacaatatccctgaaggtctggcagtggcaggcccggtttatgcggcaacggggtctaaacgcaccgcgattctgtgggcggggatttctggactagcagaaattcttggtggtgtgctggcgtggttaatcctcggtagcatgatttccccggtggtcatggcggcaatcatggcggcggttgcaggaattatggtggcgctcagcgttgatgaattaatgccgctcgccaaagagattgaccctaataataaccccagctatggcgtactatgtggaatgagtgtgatgggattcagtttagtgctgctacaaacggcgggaattggttaaaaacaacatcagaagttgtccagcgcatggacaacttctgccagcttcacgaaagccttattctaccttttcggctgtctcttctctcgtactgtttaagtatttgttccgcgcttcaagcagtgcgtctctgtcctggcgaaacgcccgacaataacgtttcaaatgcaggaaataacccaccacaaccagagcaatcaatacaatccagtaccaggcgataaacatccttttacccttaatatttaacaatactaaacatttagcgtataaatttcacatatcctttttcggatatattcatatggtcgcataataacggaacaattatatgattttgatcataatgaaaaagaatgcctgatattaatgaaattttctcatagaaagagaagcggaattaacatcttgcatagcagggaaaaataaaaaccgaagcctgctacaacttcggtttcttgattaaggcagtaaattaagcagcggttttcagctggctttacgctcatgtgcctgacggtatgccaccaggtcttcaatagtcacgagcgccatattgtgtttattggcaaactcaatacactctggtgcacgcgccatcgtgccatcgtcattagtcagctcacacagtacaccagccggtttaaagcctgccagcgtcatcagatcaatagttgcttcagtatgaccgccacgcgtcagtacaccacctgcctgagcgcgaagtgggaaaacgtggccaggacgattcagatcactcggttttgcgccatcggcaatcgctgcgcgaacggtcgtaatacggtcagcggcagaaacaccggtagtcacaccttcagctgcttcaatggtcacggtaaaaccggtgccataggcgctggtgttattttctaccatcattggcagatcgagttgtttacggcgatcttcagtaatgcacaggcaaacaataccgctaccgtggcgaatggtcagcgccatctgctcaacagtcatggtttctgccgggaagatcatatcaccttcgttttcacggtcttcatcatcaagcaccattacaccgcgtccttcacgcagcgcagccagtgcattttcaacacgttcgaaaggcgtaccaaaagaggaaagtagcgtctgattcatggtaaaaaaacctcactaaaattatggttaccagaatcagggcagtcttaggagtggcggcatatagccaaaataacgtgagcgggtccatgcccgacagaatcgttactctctcccatccggactctaaccgtcggccccggaattacaccggatctgctgtcctttgagttcgcacccaaagcgctcgcgggctttcaactgagttgatttaccgccggtggggaatttcgccccgccctgagaataagcggattcactataacgctaatgattagcggcagcaacgcatagcttcacataattctggtttatatctaatacaaacactaaaacgggccatcaggcccgttatatcagtgctctaactccagctctcttgcctgcatcatctgttgacaataccaggcataacgtgcgcaaaaccaggttctatgttcttcatccatgttaccagtaacggccagaatatcgaccgggcgaccttctgcgtgcattctggcaaaactacgcgccaggaaatcgaaattatttaaagaattaagactatgatccataagcacatcctccggttatcgcataccttttaaggccatatgctttttctgatttcagtattccccaatcagtgtagtgcctttaaacataacgtgcgtaaatatattgtccccgatcacactttttagtgaaaaataaaaaaccatattaaaagactttctcttccagaacttctctaacctgtgttattattaacacagataaatgtaagcaaggaaactattacaaagtaaatattgcgtcactaaatggacattggagtgatatatgattttattcgccgactataacaccccttatcttttcgctatttcctttgtactgttgatcggcctgttagaaatttttgcgcttatctgcggtcacatgctctccggtgctcttgatgcacatcttgaccattatgattctataaccacaggtcatattagccaggcacttcattatctcaatattggaagattgccagctctcgtcgttctctgcttactggctggtttttttggtcttattggcatcctgttgcagcatgcctgcatcatggtctggcaaagtccactgagcaacctgttcgtggttcctgtcagtttactgtttacgattattgcggtgcattataccggtaaaatagttgcgccctggattccacgcgaccatagtagtgctattacagaagaagaatatattggtagcatggcgttaattaccggtcatcaagccactagtggtaatccctgcgaaggaaaactcaccgatcaatttggccaaatacattatttactactggagcctgaagaaggaaaaattttcactaaaggagacaaagtgttaattatttgccgactttctgcaacgcgatatttggcggaaaataatccctggccccaaatattgtaatttattaatcaaaaggaaatttaataatggatgatattgttaattctgtgccctcctggatgtttaccgcaattattgccgtatgcattctgtttattattggaattattttcgccaggctctatcgtcgcgctagcgcagagcaagcttttgttcgtactggtttaggtgggcaaaaagtggtaatgagcggtggcgcaatcgtgatgccgatctttcatgaaataatccccatcaatatgaatactctgaagctggaagtcagccgcagtaccattgatagcctgattacgaaagatcgtatgcgcgtcgatgtagtagtcgctttctttgtgcgggtaaaacctagtgtagaagggattgccaccgctgcccagacgctggggcaacgcaccctgagccctgaagacttacgtatgttggttgaagataaatttgtcgatgccctccgtgcaacagctgcgcaaatgaccatgcatgagttacaggatacccgcgagaactttgtgcagggggtgcaaaatacagtggcagaagacctgagcaaaaacggtctggaactggagagcgttagtcttaccaactttaaccagaccagcaaagaacatttcaatccgaacaatgcctttgacgccgaaggtttaaccaaactgactcaggaaacagagcgccgtcgccgcgaacgtaacgaagttgaacaggatgtagaagttgcggtgcgtgaaaaaaatcgcgatgcgctaagccgcaagctggagattgaacagcaagaagcgtttatgacgcttgagcaggagcagcaggttaaaacccgtactgccgaacagaatgcacgtattgcggcttttgaagctgaacgtcgtcgtgaagcagagcagacacgaattctggctgaacgacagattcaggaaacagaaatcgaccgcgaacaggccgtccgcagtagaaaggttgaagctgaacgtgaagttcgcattaaagagatcgaacagcagcaggtcaccgaaatcgctaaccagacgaaaagcatcgctattgccgccaaaagcgaacaacagtcccaggcagaagcgcgtgctaatctcgcacttgcagaagcggtaagcgcccaacaaaacgtagaaaccactcgccagactgccgaagccgatcgtgctaaacaagttgccctaatcgctgccgcgcaggatgcagaaaccaaagcggttgaactgaccgtgcgggcgaaagcagaaaaagaagccgcagagatgcaggcggcggctatcgttgagttagccgaagctacacgtaaaaagggtctggcggaagcagaagcacaacgtgcgctgaacgatgctatcaacgtactttctgatgaacaaaccagccttaaattcaaactggccttgttgcaggcgctgcctgcggtaatagagaaatccgttgagccgatgaagagtatcgacggtatcaagattattcaggtcgatggtctgaatcgtggcggcgctgcgggtgatgcaaacacgggtaatgtggggggcggaaacctggcggaacaagcattaagtgccgctctctcttaccgcacacaggcaccgctgattgactccttgctcaatgaaattggcgttagtggcggcagtctggcggcattgactagtcccttaaccagtacaactcccgtcgaagaaaaagcagagtaaaccctcttccaggaataatccctggcccaaaaagccggggattttttatatctgcgttccgctaaaaagtgcaaatgatcaggttgttgcagcattttgcgtgacggctcggggaaggcaaaactgcatcagagaaagcattgcgtggggtctggcgctcatcaacaatcggggagtcagcagggggctgaaacgggaaagcccctcccgaagaagggggccttacagaaggaaagggttatgatgaagctcgtcatcatactgattgtgttgttactcgtaagtttcgcagcttattaacagccaatcagaggggggagaaatcctccctcacccttgttcctttactttaggttgaaaaaaaatcagcgtcaagaaggtttcattaacacatatccctggcccaaaaagccggggattttttatatctgcgttccgctaaaaggtgcaaatgctcaggacgttgcagcgttttgcgtgaccgctcggggaaggcaaaattgcctctgggaaagcattgcgcggggtccggcgctcatcaacaatcggggggcagcaaggggctgaaacgggaaagcccctcccgaagaaggggccttgtataaggaaagggttatgatgaagctcgtcatcatactggttgtgttgttactgttaagtttcccgacttactaacaactcatcagaggggggagaaatcctcccttacccttgttcctttactctaggttgaaaaaacaacagcgtcaataggcctgccatgtacgaagcgagatctgtgaaccgctttccggttagccttttttatcctgttggatcttcttgatgatgttggtcgtgctgcaaccgtcttcaaagttgagcaccaacacttcgccaccgttggcccagacttctttactcccggcaatctcttctggtttatagtcgccgcctttcaccagcagatctggcaagatcccggcgatcaagcgctgcggcgtgtcctcttcaaagctcactacccagtcgaccgcttccagtgcgcccagcacaatcatacgctgttcgagtgggtttaccgggcgggaatcccctttcagccgtttggtggaggcatcgctgttgacggcaacaatcaagcggtcacccagcttgcgggcatttgccagataagagacgtgcccggcgtgcaggatgtcaaagacaccgttggtcatcaccactttttcaccacgtttacgcgctgccgctacggccagcttcagttcctcttcggtcatcacgccaaagcctgtatctgcacgtccacgtacagcattttccagctcgatcgggctaaccgtggaggttcccagtttgccgaccaccacgccagccgccgcattggcaaagaagcaggcttcttccaggctattacccgctgccagcgttgccgccaggacgccaatcaccgtgtcgcccgcaccggtaacgtcatacacttcctgcgcttgggttggcatatgcagcggcgctttacccggttgcagcaggctcataccctgttcggaacgggtcactaacagagcgctgagttcgtaatcggcaatcagtttcatgccgcgctcaacaatctcttcttcggtcttacatttaccgacaacagcttcaaattcgctgagattcggcgttaacagcgtagcgccgcggtagcgctcaaaatcggtaccttttggatcaatcagcaccggaacacccgctttacgcgccagttggatcatctgctgtacgcttgccagcgcacctttggcgtagtcagaaagcaccagcgcgccaatgctactcagcgcctgattaatccgctcgtgcagcggctgcggatcaacaccttcgaaaccttcttcaaaatccagacggatcagctgttggttgcgggaaagtacccgtaatttggtaatggtcggatgcgtcggtacagaaacgaagtcgcatttgacgttgacgtcggccagagatttactcagcgcgcgcgctgcatcgtcaatgcccgtcaacccgaccaggcgtgcattagcaccgagagaagcgatattcatcgccacgttagccgcgccgcccggacgttcttcgatggtattcactttaaccacgggcaccggcgcttccgggctgatacgactggtggggccgtaccagtaacgatccagcatcacatcaccaaccaccatcactcctgcacgttcaaactctggcagcgttactttcattcctgtctcctgagagattcaaaatttgcgcgcgataataccatacttcattcttccaccagccacttctgccagcttgcccgcaccagttcacgctctgcggtgaagcaatcctcgctcacatggcccggcaattcctgtaatgccagatgatgaagttcatcgcgaagcgtagtgtaagcacgggtcagcgccatcgcttcctgctcttccataatgtcgttttgcgccagtagttccagaatacgcacgttgtcactccagcgcgttaacttcggtttttcatgagcgtagcgcaacaccagatattgggtaataaattcgatatcggtaattcccccttcatcagctttgatatcaaagcgatcgcgatgtttattgccgagatgagcgcgcattttctcgcgcatttcccgcacttccgtttgcagagttttaccttcacgcggcagcgtcataatctcgcgacgcactgcgtcaaagtgcgcggtgagctgcggatcgccgtacactacacgcgcacgcaccagcgcctgatgttcccacgtccaggcctcgtttttctgataatcggcaaatgcttctgcggatgtcaccagcattcccgccgccccggacggacgcagtcgagcatccacttcatacaaaatgccggaagaggtacgcgtactgaacagatgcataatgcgttgcgccagacgcagataaaactgccgcccgtcgatttcccgctcaccgtcagtcatcgcatccattgggcaatcatggaggaagataaggtcaagatcggaactgtagcctaactcccagccgcccagcttgccgtagccgaccaccgcaaaaccacgcccttcgcgttcgttcaggtgattcggcttaccgtagcgggcaaccatttgaacccacgcctgctgaacgacggcatctatcatggcttccgccagccaggttaagtgatcgctcactttcatcaccggtagcgtaccggcgatatccgctgcggcgatgcgtaacagctgcgcctgtttgaactgacgcagcgcctcaagctgttgctcttcgtcatcttccggcacgcgcagcaaatactggcgcaactcatcgcggtaggcatcggtcgccgtcggctggtaaagggtgtttggatcgagcaattcatccagcaataatggataacgcgccagctggctggcaatcatcgggctcgcggcacacagagaaatcaaatgtttaagcgccgcggggaattcactgagcaattctaaataggtggtgcgggtaacaatccccaccagcaaggcggtaatgcggctcagcgtaacggcagcgtcttcacgcgcacagacatcacttagcagatgcggcatcagatggtcgagcacctgacgtcctcgcggcccgatggtgcgcttatccagctctttgcggaaatcggcaatcagcgttagcacctgtttgcgatcatcctcgctaagatgcgccagcactggcgtagtgtcatcttcctgcaacgcatcctgccacagctcacgccactgttcgctcaggctctcttcctgagtttcactttcatcgtcgccaatcaattcattaaacacccggcgcacattggtcatatgtgcggtcagcgccccggtcagttgcggccagtcagcaaagtccatcgcccacgccagccgcgcacgattaagctcatcagaaggaagcgtctgggtttgttcgtcgttaatgctttgcagcaggttttccagacgccgcaggaacagatacgccactcgcaattgttcagcatcgttttcagaaagcagatgcagctcggcaatggcgctgagcgttggcagtaaagagcggctttgcaggctcggttcgcgtccgccgcgaatgagctggaacacctgaacgataaattcaatttcgcgaatgccgcctgcgccgagtttgatattgtcggtcaaaccacgtcgacgcacttcacgggcaatcatccctttcatgttgcgcaggctctgaatcacgctgaaatcgatgtaacgacggaaaacaaacgggcgcagcatcgcacgcaactcgttagcatagacgccttcgctatcgcccataatccgcgccttgaccatcgcgtaacgctcccagtcgcgcccctgctcctggtaataatcttccaacgcggcaaagctcagcaccagcgggccactttcgccaaacggacgcagccgcatatccacgcgatagacgaagccatcctgcgttggttgatccagcactttaatcagccgctgccccatgcgggtaaaaaactgcgcgttatccagttcccggcgtccaccctgcgtacaaccatgttccggccaggcaaaaatcagatcgatatcagaggagaaattcagctccccaccgcccagcttacccatgcctaaaatcagcagcggttgcgcttcgccctgcgcattgcacggcgttccccactcgcggcagcaggcgtcatacagccagtcacgcgccgcaacaatcagcgtctccgccagatagctgagctgctgcaatatgctctcttcagtaaccagtgccagcgtttgcgcccaggcgatgcgcaccataatgcgccgccggaatagccgcagctcgcgcattaacccggcttcgtcactcacattacagagcgcctcctgcaaccatgccgcgtaatgctgccattcgtcggcctgcggcggttggctttccagttccgtcagccactctggatgcgcaatcacgctgtcctgcacaaaatcactaaaagtaagtacactcttcgcctgtgcgctaagactttcctcggctaaaggctctggcagccgctcaacaacggtctgccagtactgctgtaacggactagagagcggcttcataagcgattttatccttgcctgattaacgttttccgctgtgcaaccagaacggttcctgattgtttgcctcattacggaaatgttcaatttcgatgcgttgcccggtcgcaatagcgtgatgcagcccctgccagttctccagccaggcttgcgcgacgacaggatcatagtaacccgccagcaacagtatactgtcaatatcacgcgtcaggcgtggcaactggtcacggtagcgatcgcctaacggctggcagaaaacgcttttcagttcagcggcatggcgggaaagatggatatcggcaaagcgtttgaaggagtcgctgattttgccctgcgctttggcatctaaaaatggctgccatgctttgcttaccaaccattcggtcaacgccagcttcgccattgccgtttcggtagagtagaccgccgtcacggcagacaccgcagaagcaatggtcgcctcgcattgagtcagcagatcacgtaagtgagtgctcgctttacgcggcacaataccaccgaacagcatcagcgtatgacggaccaggctaatggctgccagcacctgttctttcgccgcatcgttgccgcgtacccacagttcttcatgatactgccattgcgctaacgccagctcgagcgccgcttccagcccctgttccacatcggcttttgccgcaacatgcaaaatggtggtcggtttgatttcacgcgccggattgccctgcgccagatgatagccacgcgccgctttgctcaggctgccctggcgtaatccggtttggcttaccagttggttcgccagtttcagcaccgcgcgcgtgtcgccgctaagcagttccagttccagctcacagataggttcagcaaattcacccgctttcacttccccctggtcgagggcgatttcaatttggctaccatcgaccgccaccagccatttttcgcgataaaaatcggtgctgaacagcggctgcacgcgggaggcgagatcggcgggcaattcgccgttcggccagacttccgtcggtaactgcgccaggtcgagcgtcggttcgctcaacgccacgttatattccgggcgctgatgtaagccgcctgtcactcttcctgcaactttcatggtcatctcatagcgaccgttttcgccacgaatacgtaagcccatatcgtgcccacgcagccagttatccggcgtttcgtagtaaatattcagcaactgcacggggtcatggtgctcgccgcccagcgtattgagatggtcacgcaacgcctcaacggcactgtgattaacaataaactttaattcgatttcctgagccatggcctttacttatcggttatgtcacataagtgacgatgaacggcgaacttaatgcgatcttttttgtcagtagatagtattttgcgccaaattgccatgcaacgggcaatttgacgggcgtaaaagtttgaagcagtggcaagacctgacacagaggattccgattgatgtcgaatgctttgcgtagcgacactgatgccactactatcgttccactttccatgacaataacgacagcctgatgccaaaattacgcctgatcggattaactttactcgcacttagcgcgactgccgtcagtcacgctgaagaaacgcgctatgtttccgacgaactgaatacctgggtccgcagcggtccgggagatcattatcgcctcgtgggcacggttaacgccggcgaggaagtgaccttattacaaactgacgccaacaccaattatgcccaggtgaaagacagctctggccgtaccgcctggatcccgttgaaacaacttagcactgagccaagcctgcgctcccgtgtgccagatctggaaaatcaggtcaaaaccctgaccgataaactcaccaatatcgataacacctggaatcagcgcaccgcagaaatgcagcaaaaagtggcgcagagcgacagcgtgatcaacgggttaaaagaagaaaatcagaaactgaaaaacgagctgattgtcgcgcagaaaaaggtcgatgccgccagcgtacagctggatgacaaacagcgcaccatcatcatgcaatggtttatgtatggcggtggcgtgctggggcttggcttgctgctcggtctggtactgccgcacctgatcccaagccgcaaacgcaaagatcgctggatgaactaaatcgccttcttcgttgcactgtcttattattaggaattgtgtatttgacgaagggatgatggcgtgaagatttatctggtcggtggtgctgttcgggatgcattgttagggctaccggtcaaagacagagattgggtggtggtcggcagtacgccacaggagatgctcgacgcgggctaccagcaggtaggccgcgattttcctgtgtttctgcatccgcaaacgcatgaagagtatgcgctggcacgtaccgaacggaaatccggttccggttacaccggttttacttgctatgccgcaccggatgtcacgctggaagatgatcttaagcgtcgcgatctgaccattaatgcgctggcccaggacgataacggcgagattatcgacccgtacaacggtctgggcgatctgcaaaatcgtctgttgcgccatgtttcccccgcttttggcgaagatccgttacgcgtattgcgcgtggcgcgttttgctgcgcgttatgcccacctcggttttcgtattgccgatgaaactctggcgttgatgcgcgagatgacccatgcgggtgaactggaacacctgacgcctgaacgggtatggaaagagacggaaagcgccctcaccacccgcaatccacaggtgttcttccaggtactgcgcgattgcggcgcactgcgcgttttattcccggaaattgacgcactgtttggcgttccggcccctgccaagtggcatccggaaatcgatacgggtattcataccttaatgacgctcagtatggcggcgatgctgagtccgcaggtcgatgtccgtttcgcaactttatgccacgatctcggtaaagggctgacgccgccagaactctggccgcgtcatcatggtcatggcccggcgggtgttaagttagtggaacaactatgccagcgtctgcgcgtgccaaatgaaattcgcgatttagccagactggtggctgagtttcacgatctcatccacaccttcccaatgctgaacccaaaaaccatcgtcaaattatttgattccatcgatgcctggcgtaaaccgcagcgtgtcgagcaactggcgctgaccagcgaggctgacgtgcgcggcagaaccggttttgaaagtgcggactacccgcaaggccgctggttgcgcgaagcctgggaagtggcgcagagtgtgccgacaaaagccgtcgttgaagcgggatttaaaggtgtggagattcgcgaggagctgacccgacggcggattgcggcggtagccagctggaaggaacaacgttgcccaaagcctgaatgagtattgggcattttgccggatgcggcgtaaacgccttatccggctacatgtcaacgacagttgtaggcctgataagacgcgcaagcgtcgcatcaggcgttgattgccggatgcggcgtgaacgccttattcggcctacgcaatcgttgacaacgccaagcatccgacactattcctcaattaaaagaacacgacatacaccgcagccgccacaataaagcgataaatggcgaacgggataaagctaatgcgcttaatcaattgcaggaaggttttaatcgctatcagcgccaccacaaaagcggtgataaacccaacggcaaacatcgggatatcgccgcttgtcaggaagccccagcttttgtagagatcgagcgccgttgcgcccatcatcatcggcaccgccagcaggaagctaaactcggaagcagcgtaacggctcacccccatcagcatcccaccactaatggtcgccccggaacgggagaaacccggccacagcgccagacactggaaacagccaatcataaatgcctgacgataggtcatatcatcaagacccggcgcacgcggctctttcggcttcaggcattcggcggcaatcagcaacaaaccgccaacgaccagcgcatacatcacatttatcgggttaaacaaactcttaatcgtgtcgtggaacaacagccccaataccaccgccggaatcatccccagcaaaatgtggatcagcgttaaacgacctttgctttcaccttcgtgctgcaacgggcggccaaagtggatgccaatcaggccaaacagacgccgccagaacatcactactaccgccagaatacttcctaactggatcacaacttcaaaggttttcgccgtgtcgccctcaaaccccaacaagtgaccgacaataatcatatggcccgtgctggataccggcagaaattctgtcaatccttcgaccacacccaatattgccgctatcagcaggctgtgcatatcgctcatcaataaacccctaaattattaaaatgtaccgcttgtccgaactactgcgtatgaccaggttataaccgtttggtttaacagctgtaaaattaattattttctttcagattattgccacgctcaatgattacgccaacattcgccgcccgcgccactgcgcctggcttgctgagtttgatacgcacccacgggctgttgaagcgtgctaacagcagctccgccacctcttcagccacgcgttccaccagcgcaaaacgcgccccctcgacgtggctgaccaccgtttctgcaatgtcagcgtaactgaggcaatccgccacatcatcacttttcgccgctttacggttatcccacgccatttcgatatcgaacactaacttctgttcgatggtctgttcccagtcgtaaacaccaatagtggtgattacgctaagttgctctataaatacaatatccatcacgtcctgcctgctttttggctaaccggataccacttccggcgaaatgtgcgtattatccacagattcatcgttgaacacgaattttcaaaacggaacagcttatgagtgcaatcgcgcctggaatgatcctcatcgcgtacctctgcggctccatttccagtgccattctggtttgccgcttgtgtgggctgcccgatccgcgaaccagcggctccggcaatccaggcgcaaccaatgtgttacgtatcggtggcaagggagcagccgtagcagtactgattttcgacgttctgaaaggaatgttgcccgtctggggcgcgtatgaattaggtgtcagccccttctggctaggcttaattgccatcgccgcctgtcttggacacatctggcccgttttcttcggatttaaaggaggaaaaggcgttgctaccgcttttggtgccatcgcacccattggctgggatctcaccggagtaatggcgggaacctggttactgaccgtgctattgagcggatacagcagcctgggagcgattgtcagtgcactgattgctccgttttatgtctggtggtttaagccacaattcaccttcccggttagcatgctctcttgcctgatcctgctgcgtcatcatgacaacatccaacgtctgtggcgtcgtcaggagacaaaaatctggacgaaattcaaaagaaagcgcgaaaaggatcccgagtgatttctggtggatttacatgacctgatagccttcatcgggcttgcccagccgttgctggcaccatgccgccagaaattccacgcagacacgtaatttcatgctgcgatagagcggctcccggtaaacagcccagatattggcgctttgtgcatactctggcaatacttgcaccagtttgccactctccagaaacggcaacacatcccactcggaacgcagcataatccctttgccctccagcgcccattgcagcacaatctcgccgctattggaggaaagatgcccgcttaccttcacgctttttttctcctgaccgttccccaactcccatattccatgggtcatatcgcgctctttggtcaccagacagtcatgacgacttaattcctgtagggattgtggctgcggatatttttgcagatactcaggtgctgcgcataatattcttttattttttgtcaaaagatgcgcaatataataatcaggaatttcgtcattaatacgaatatccagatcaatattatcctgcactaaatcaatttgccgatcgaacaattcaaaatgcacctgtaactcaggataattgcgcatcagttcggtaatagctggcgcaatatggctgcgcccaaaaccaaaactgcaaccaatacgaatcatcccctccgggcgcgttttgatttgcgtgacgtcatcgaccagtcgctgatattgggtgaggatttccaacgcatgttcgtaacaacgttggccactttcagtcagcgccacgccgcgagcggagcggttcagcagcgttgttgccagcgtattttcaaggatttggatccgcttggtgacaaatgcaggcgtctgcccaagcgtcgccgctgcggcgctaaaactcccgctgtgaacgatttctaccagtacctgcaagtctttggctaaaggccagctattcagcatcgttaattatccgcagttgtgataagcgcagtgtatttcgcaaaacattgccattccctgctctggcgcaatattcattcttattttcgcgttgattcacgaactgttaattacatattcacggtggcaaaaaatataaaaccacatttttagtggtagtttgtggcggtgaatttttccagacaaatacaaaaactggagttgccatgatgagcgaaagtaataagcaacaggcagtgaataagttgacagagattgtcgctaactttaccgccatgatttctacccgaatgcctgatgacgtggtggataaactaaaacagctaaaggatgccgaaacgagcagcatggggaaaattatctaccatacgatgttcgacaacatgcaaaaagcgattgacctgaatcgtcctgcctgtcaggacaccggggagattatgttcttcgttaaagtcggttcccgcttcccactgcttggcgagctgcaaagcatactcaaacaagccgtggaagaggcaaccgtcaaagcgccactacgtcacaatgcggtagaaatttttgacgaagtaaacaccggcaaaaataccggtagcggcgtaccgtgggtcacctgggacatcatccccgacaatgacgatgcggaaatcgaagtttacatggcaggcggcggctgcacgctacctggccgcagcaaagtgttaatgccgagtgaaggctacgaaggcgtggtgaaattcgtcttcgaaaatatctccaccctcgccgtaaacgcctgtccaccggtactggtgggcgtgggcatcgccaccagcgtggaaaccgccgccgtactcagccgtaaagccattttgcgcccgattggcagccgccatcccaatccaaaagcggcagaactggagctacgcctggaagaaggactcaaccgtctggggattggtccacaagggctgaccggcaacagtagtgtgatgggcgtacatatcgaatctgccgcccgccatccgagtaccatcggcgttgctgtctctaccggctgctgggcgcatcgtcgcggcacgctgctggttcatgccgatctcacctttgaaaatctgtctcacacccggagcgcgttatgaaaaagatcctgacaaccccgatcaaagctgaagatctgcaagatattcgcgtcggcgatgtgatctacctgaccggtacgctggtgacctgccgcgacgtttgtcaccgccgtttgatcgaactgaaacgtccgatcccttacgatctcaacggcaaagcgattttccacgctggccccatcgtgcgcaaaaacggcgacaaatgggagatggtctccgtcggcccgacaaccagtatgcgtatggaaagttttgaacgtgaatttattgagcagaccggcgtgaaactggtggttggcaaaggtggtatggggccgctgaccgaagaaggctgccagaaattcaaggcgctacatgtgattttcccggcaggctgcgcggtgctggcggcaacccaggtggaagagattgaagaagtgcactggacagagctcggaatgccggagagtctgtgggtctgccgggtcaaagagttcggcccgctgattgtctctattgatacccacggcaacaacctgatagccgaaaacaaaaagctgttcgccgaacgccgcgatcccatcgtggaagagatctgcgagcacgtccattacatcaaataaccctcccggagaggctcacccctctcctttttcgcaggcataacacgatgaaaccttccactgaatggtggcgatatcttgcgccgctggcggtcatcgccattattgctctacttccggttcccgcagggctggagaaccatacctggctctactttgccgtttttactggcgtgatcgttggactgatcctcgaacccgtgccgggtgccgtggtggcgatggtgggtatatccatcatcgccatactctctccctggctgctgttcagcccggagcagctcgctcagccaggctttaaattcactgcaaaatccctcagctgggccgtttccggtttttctaatagcgttatctggctgattttcgccgcctttatgtttggcacaggctatgaaaaaaccgggcttggacgccgcattgcgctgattctggtgaaaaagatgggacatcgcacgctgtttctcggctatgcggtgatgttctccgagctgatcctcgcacctgtaacaccgtccaacagcgcgcgtggtgcggggattatctatcccatcatccgtaacctgccaccgctctatcaaagtcaaccaaacgacagcagtagccgcagcattggcagctacatcatgtggatggggattgttgccgactgcgtgaccagcgccattttcttgacggcgatggcaccaaacttgctgttaattggactgatgaaaagcgcatctcacgccacgctgagttggggcgactggttcctcgggatgttgccgctcagcattttactggttctgctggttccctggctggcttacgtgctgtacccgccggtactgaagtctggcgatcaggtgccgcgctgggcagagacggaactgcaggcaatgggcccgctctgtagccgtgaaaaacggatgctggggctgatggtaggcgcgctggtgctgtggattttcggcggtgattatatcgatgccgcgatggtcggttacagcgtggtggcactgatgctgcttctgcgcattatcagttgggacgacattgtcagtaataaagcggcgtggaacgttttcttctggctggccagccttatcaccctcgccaccggactcaacaacaccggttttattagctggtttggcaaactgttagcaggcagcttaagcggttatagcccaacgatggtgatggtggcgttgattgtggtgttttatctactgcgctactttttcgccagcgccacggcgtatacctccgctctcgcaccgatgatgattgctgctgcgctggcgatgccggaaatcccgctgccggtgttctgcctgatggttggtgcggcaattggtctggggagcattcttacaccatacgccaccggccccagtccgatttactacggcagtggttatctgccaacggcggattactggcgactgggggcgatttttgggctgatattcctcgtattgctggtgattaccggcttactgtggatgcccgtggtgttgctttaagtgaggacggtgccggaaattgctctccggcacccaatagttttacgcagccggtaactccgccagcggccagcgcggacgcacgctaacgccgagatccgccgtcgcgcctgctttaaaccgcaccattccggcataggcgatcatcgcgccgttatcagtacaaaattccggacgcgcgtagaacacttcgccgcggcgttttttcatcatttcagccagcttcgcccgtaacgtacggttagcactcacgccgcccgccatgaccagtcgcttaaagcccgtctgatccagcgcccgcttgcacttaatcatcagcgtatcgaccaccgcatcttcaaaggcgcgggcgatatcagcacgcgtctggtcgtcggtgccgttgtcacgaatggtatttgccgcgaaggttttcaggccggagaagctgaaatccagccccggacggtcggtcatcggacgcgggaagacaaagcgcccggcagtaccctgagccgccattttgctcagtaacggcccgccaggataatccagccccagcagcttcgcggttttatcaaacgcttccccggcggcatcatcgatagactcgccgagcagctcgtactgaccaatgccagtcacgctgattaactgcgtatgaccgccggaaacaagcagcgcaacaaacggaaattccggcgggttatcttccagcatcggcgctaacagatgcccttccatatggtgtacagggatcgccggaacgtcccaggcaaacgccagagaacgccccacggtcgcgccaaccagtagcgcgccgactaatccagggcctgcggtataggccacagcatcaatgtcttttgccgttaaaccagactcctttagcgccgcctggatcaacggtacggttttacgcacatgatcgcgggaggccagttcaggcacgacgccgccgtagtcagcgtgcaatttcacctgactatacaattggttggctaacaaacctttttcatcgtcgtaaatggcgatgccggtttcatcgcaggaagtttcaatacccagtacacgcatgacttgttttacctcgctttattaccgcgcagtgtaggaccaatgcgggttgatgtaaaactttgttcgcccctggagaaagcctcgtgtatactcctcacccttataaaagtccctttcaaaaaaggccgcggtgctttacaaagcagcagcaattgcagtaaaattccgcaccattttgaaataagctggcgttgatgccagcggcaaaccgaattaatcaaaggtgagaggcacatgccggtaattaaagtacgtgaaaacgagccgttcgacgtagctctgcgtcgcttcaagcgttcctgcgaaaaagcaggtgttctggcggaagttcgtcgtcgtgagttctatgaaaaaccgactaccgaacgtaagcgcgctaaagcttctgcagtgaaacgtcacgcgaagaaactggctcgcgaaaacgcacgccgcactcgtctgtactaattccccgagagcgttgctctccgatcagaccgagttgtagttgtaaggccgtgcttccgaaaggaatgcgcggcttattttcgtttatgaattgctaaaaatcggggcctatggctggacgaatcccacgcgtattcattaatgatctgctggcacgcactgacatcgtcgatctgatcgatgcccgtgtgaagctgaaaaagcagggcaagaatttccacgcgtgttgtccattccacaacgagaaaaccccgtccttcaccgttaacggtgagaaacagttttaccactgctttggatgtggcgcgcacggcaacgcgatcgacttcctgatgaactacgacaagctcgagttcgtcgaaacggtcgaagagctggcagcaatgcacaatcttgaagtgccatttgaagcaggcagcggccccagccagatcgagcgccatcagaggcaaacgctttatcagttgatggacggtctgaatacgttttaccaacaatctttacaacaacctgttgccacgtctgcgcgccagtatctggaaaaacgcggattaagccacgaggttatcgctcgctttgcgattggttttgcgccccccggctgggacaacgtcctgaagcggtttggcggcaatccagaaaatcgccagagtttgattgatgcggggatgttggtcactaacgatcagggacgcagttacgatcgtttccgcgagcgggtgatgttccccattcgcgataaacgcggtcgggtgattggttttggcgggcgcgtgctgggcaacgatacccccaaatacctgaacagcccggaaacagacattttccataaaggccgccagctttacggtctttatgaagcgcagcaggataacgctgaacccaatcgtctgcttgtggtcgaaggctatatggacgtggtggcgctggcgcaatacggcattaattacgccgttgcgagcttaggtacgagtaccaccgccgatcacatacaactgttgttccgcgcgaccaacaatgtcatttgctgttatgacggcgaccgtgcaggccgcgatgccgcctggcgagcgctggaaacggcgctgccttacatgacagacggccgtcagctacgctttatgtttttgcctgatggcgaagaccctgacacgctagtacgaaaagaaggtaaagaagcgtttgaagcgcggatggagcaggcgatgccactctccgcatttctgtttaacagtctgatgccgcaagttgatctgagtacccctgacgggcgcgcacgtttgagtacgctggcactaccattgataagccaagtgccgggcgaaacgctgcgaatatatcttcgtcaggaattaggcaacaaattaggcatacttgatgacagccagcttgaacgattaatgccaaaagcggcagagagcggcgtttctcgccctgttccgcagctaaaacgcacgaccatgcgtatacttatagggttgctggtgcaaaatccagaattagcgacgttggtcccgccgcttgagaatctggatgaaaataagctccctggacttggcttattcagagaactggtcaacacttgtctctcccagccaggtctgaccaccgggcaacttttagagcactatcgtggtacaaataatgctgccacccttgaaaaactgagcatgtgggacgatatagcagataagaatattgctgagcaaaccttcaccgacagtctcaaccatatgtttgatagcctgcttgaactgcgccaggaagagttaatcgctcgtgagcgcacgcatggtttaagcaacgaagaacgcctggagctctggacattaaaccaggagctggcgaaaaagtgatttaacggcttaagtgccgaagagcgatcgggaagcccccgacagccgcactgagaggcagcggcaaatatataagtacgccctcgtaattatcgttggcggtaaacaaccgttggatttcagcgttaacggctgaaggacatcgggtcaatcgcccaacaccaacctcatgaaataagtgtggataccgtcttatggagcaaaacccgcagagtcagctgaaacttcttgtcacccgtggtaaggagcaaggctatctgacctatgccgaggtcaatgaccatctgccggaagatatcgtcgatagtgatcagatcgaagacatcatccaaatgatcaacgacatgggcattcaggtgatggaagaagcaccggatgccgatgatctgatgctggctgaaaacaccgcggacgaagatgctgccgaagccgccgcgcaggtgctttccagcgtggaatctgaaatcgggcgcacgactgacccggtacgcatgtacatgcgtgaaatgggcaccgttgaactgttgacccgcgaaggcgaaattgacatcgctaagcgtattgaagacgggatcaaccaggttcaatgctccgttgctgaatatccggaagcgatcacctatctgctggaacagtacgatcgtgttgaagcagaagaagcgcgtctgtccgatctgatcaccggctttgttgacccgaacgcagaagaagatctggcacctaccgccactcacgtcggttctgagctttcccaggaagatctggacgatgacgaagatgaagacgaagaagatggcgatgacgacagcgccgatgatgacaacagcatcgacccggaactggctcgcgaaaaatttgcggaactacgcgctcagtacgttgtaacgcgtgacaccatcaaagcgaaaggtcgcagtcacgctaccgctcaggaagagatcctgaaactgtctgaagtattcaaacagttccgcctggtgccgaagcagtttgactacctggtcaacagcatgcgcgtcatgatggaccgcgttcgtacgcaagaacgtctgatcatgaagctctgcgttgagcagtgcaaaatgccgaagaaaaacttcattaccctgtttaccggcaacgaaaccagcgatacctggttcaacgcggcaattgcgatgaacaagccgtggagcgaaaaactgcacgatgtctctgaagaagtgcatcgcgccctgcaaaaactgcagcagattgaagaagaaaccggcctgaccatcgagcaggttaaagatatcaaccgtcgtatgtccatcggtgaagcgaaagcccgccgtgcgaagaaagagatggttgaagcgaacttacgtctggttatttctatcgctaagaaatacaccaaccgtggcttgcagttccttgacctgattcaggaaggcaacatcggtctgatgaaagcggttgataaattcgaataccgccgtggttacaagttctccacctacgcaacctggtggatccgtcaggcgatcacccgctctatcgcggatcaggcgcgcaccatccgtattccggtgcatatgattgagaccatcaacaagctcaaccgtatttctcgccagatgctgcaagagatgggccgtgaaccgacgccggaagaactggctgaacgtatgctgatgccggaagacaagatccgcaaagtgctgaagatcgccaaagagccaatctccatggaaacgccgatcggtgatgatgaagatagccatctgggggatttcatcgaggataccaccctcgagctgccgctggattctgcgaccaccgaaagcctgcgtgcggcaacgcacgacgtgctggctggcctgaccgcgcgtgaagcaaaagttctgcgtatgcgtttcggtatcgatatgaacaccgactacacgctggaagaagtgggtaaacagttcgacgttacccgcgaacgtatccgtcagatcgaagcgaaggcgctgcgcaaactgcgtcacccgagccgttctgaagtgctgcgtagcttcctggacgattaatcggtaggccggatcaggcgttacgccgcacccggcactaggccctctgcacaaacgccaccttttcggtggcgttttttatcgcccacgcactaccagcgcctggtccagctcgcgatacgcttcaaccagtttctccagactaacgcgacttaaaccgctgggatttggcagcacccaaatctgcgtgctaccaatggtgagcgtttgtttcccccactgtgcaccgcgctggctgaatccctgttcatatgcttgtttgcccagaatcgccaacgcctgcggctgataatcttcaattttttcaatcagcttacgcccgcctgcgtgtagctcctgcttactaacttcattggcttgcaccgttggacggtctaccagtttggtgacgccacaacgataatccagcagatgctgtgcctcctgcggcttcaactgacggtcggtaaacccggcctgatatatcaccttccagaagcgatttgccggatgagcaaagggaaaaccagtcccggcggaactaagcccagggttgataccgcaaaacacgacccgtaaccctggagccaaaatatcctcaaccatatttactcctttctaacatcaccaggaaaagtataacggattgaaaatacattgtttataaaaacagcaggcgcgcggtaatggctggattgcgacacggagttactttataatccgctaccatggccccttagctcagtggttagagcaggcgactcataatcgcttggtcgctggttcaagtccagcaggggccaccagatatagcaaaggctgacgagaaatcgtcagcctttttctttttatatatcagttactttgcgtgccagtaagccgctgcacgtacccgctgtgggtcatactgttccgcttcaaagcggcggcttaaattcttaacgactttaccttcgccggttatccagatgaagtaatcatcggcagggatttgcatctgcgccagacgcgcatctaccgcctgctcatcatgtgccagccattcgatattaaaaccatcaaggtgcgcgagataatcctgacaggcgttatcccgcacgctaaccagcgcactaacttgcggtttaacggcaagtttgctcaacgtttccaggcggcggcgcaatgcaggcattccggattcatcgcagacatacagctgatacgcgtaatcttccggcaccaccaggctaccgcgcggacctgccaccgtaagtttatcgcccggttgcgcctgcatcgcccagccgctggcgaccccaccgtcgtgaataaagaaatcaatcgccagttcatggcgtagttcgtcatacagcggcgtatagtcacggctcggtgggcgtggtccttccggccagacgatgccctcttccgttaccgttggcggcacaaagtgagcgtcaggttgaggaaagaagagtttgctgtgatcgtcaaagccacggcttgtaaaaccgtccagcgcctcgccgccgaggacaatgcgctgaaaaccggcgctgatgcgctcaacgcgtaacacagtcagttcacggaagcgcagatcattgcgaacgcgctgcgggtagcggggggtgttattcattgttatcgccttcgtgatggtaatcagatatatctaaataaaactcgcaaatgataatgattgttaatcatgataaatgcaagcgatttgtagaactgatatgtctatagtctgataagacgaaccgcctcttctcaggcatcattactcaacgccggatgcggcgtgaacgccttatccggcctacgtgtgagatgagtccacgtttaaaaatcatttttacacttgcaagaacgctcatatcagatataaattagatatatctaattaagcaaaaggaggctgatatgagccatcatcacgaagggtgttgtaaacatgaaggccagccacgccatgagggctgctgcaaaggtgagaagagtgaacacgagcactgcggacacggtcaccagcatgaacacggtcaatgctgcggtggtcgccacggtcgcggcggcggtcgtcggcaacgtttctttggtcacggtgaattacgtctggtgattctggatattctcagccgcgatgacagccacggttacgaattgattaaagcgattgagaatctaacccaggggaattacaccccaagcccgggcgtcatctacccaacgctggattttctgcaggagcagagcctgattaccatccgcgaagaggaaggaggtaagaagcagattgcgctgaccgaacaaggcgcgcagtggctggaagaaaaccgcgaacaggtggagatgattgaagaacgcatcaaagcgcgttgcgttggcgcggcgctgcgccagaacccgcaaatgaagcgggcgctggataattttaaagcggtgctggatttacgcgtcaaccagagcgatatcagtgatgcacaaataaaaaagatcattgcggtgatcgaccgcgccgcttttgatattacgcaactggattaatcgccgcatccgccagtggcgcggtgcaattgccggatgcgacgcttgacgcgccttatccggcctacacccgctacacaccccgcaggcctgataagatgcgccagcatcgcatcaggcattgtgctccaaccgccggatccggcataccgattaatgcagtaccgtcaccgcgtcttccagtcggctggcgcggtgtttcaccatcgcgctcacctgcgcactctcttccaccagctcggcatttttctgggtgatcaggttaagctcatccactgcacgggtcaggctggaaagcccatcggcctgttccagcgtactatggctaatctgggcgatcaactgggtgacgtttttcacctgtgccacaatatcttccatcgtccgtccggcggcgtgtacctgctggctaccggattgcaccttatcagcactggcatcaatcagcttgcgaatatcgttggcagcattagcgctgcggctggctaaatgacgcacttcccctgccaccactgcaaaacctttgccctgttcgccggcacgcgccgcttccaccgccgcattcagggccagaatattggtctgaaacgcaatatcgttaatcaggctagtaatggtgccaatgcgctgggtactgtcggcgatatcgtccattgtcttgatcaccgtggtcatcgcctccccaccctgcactgccgcattactggcagtgatactcagtttatcggcagcgctcgccgtggcagagttctgtttcacgctcgccgccatttggttcatggtcgccaccgtttgctgaacgttatcaactgtctgctgggtatgttcgttcagttcatcggtgcctttcgccagcgtctcactgccatttctgacactggacacctggctactgacatcgttaattagccaacggcacatcaggccaagttgccctaccgcacgtaatgtcagccccagctcatcgctgcgattcagatgctcaacactattacgttctccggtcgccaccttcagtgcctgatgggcaacattttctatcgggcgcacaatctgccattcaaaacaggcgcttgccaacaataccactaacgcacagaggatatacgtcaccaccggggcagcaacaaaccaaagcatggccgccagcaagataaacatcagggtcatcactccacgcgcccgccagcgaagcggtaaactaggcagtttacccagccagcctttacgcaccaccaggcctttatgaatacgcttactggtacgtccggcgttcaacgctttgtacagcggctccaccgccgcgatctcttcatccgtcgcccgggtacgaatgctcatatagccactgatttttccctcgcgcaccatcggtaccgcattggcccgcacccaataatggtcaccatttttgcggcgatttttcacgatgccgctccagggctccccttttttcagggtgaaccacatatccgcaaacgccgcttttggcatatccgggtgacgcaccatgttgtgcggctgcccttgtaactcttgcaaggtatagccgctcacctgcacaaaagtgtcattagcatgagtgatatagctttgcagatcggtagtggacatcagagtggtatcgtccgccagcggggtattttgctgggtgacatacggatgagaagacatgttcgcgtcctgtgcaggttatatggttgttaacttcttgtcagagtttatgtcggccccgctgcggttatctttaaccgattaatttgatttagatcgcaatttgcgatttaaacacaaatctaattccttgatttaaaatactttcactctgttactatacgaaaacgttaattatcttgcccaaaaatcaggcaattattgccctgaaaacgtgcatttgcgcagcaatcatcaaatccatacccgacaaaaaccgtgcaaaataacaacaaatgttaacagatagcattaaatattgcacaaatgataaccgaatttgtgtttatcccgattttcgcgatcgcagccggagtggcgcaatccctgcaatacttaaatcggtatcatgtgatacgcgagcctccggagcatattttgaacaggttacctagcagcgcaagcgctttagcgtgcagcgcccacgccctgaatctcattgagaagcgaacgctggatcatgaggagatgaaagcacttaaccgagaggtgattgaatacttcaaagagcatgtcaatccggggtttttagagtatcgcaaatctgttaccgccggcggggattacggagccgtagagtggcaagcgggaagtttaaatacgcttgtcgacacccagggccaggagtttatcgactgcctgggaggttttggaattttcaacgtggggcaccgtaatccagttgtggtttccgccgtacagaatcaacttgcgaaacaaccgctgcacagccaggagctgctcgatccgttacgggcgatgttggcgaaaacccttgctgcgctaacgcccggtaaactgaaatacagcttcttctgtaatagcggcaccgagtccgttgaagcagcgctgaagctggcgaaagcttaccagagtccgcgcggcaagtttacttttattgccaccagcggcgcgttccacggtaaaagtcttggcgcgctgagcgccacggcgaaaagcaccttccgcaaaccgtttatgccgttactgccgggcttccgtcatgtgccgtttggcaatatcgaagccatgcgcacggctcttaacgagtgcaaaaaaaccggtgatgatgtggctgcggtgatcctcgaaccgattcagggtgaaggtggcgtaattctgccgccgccgggctatctcaccgccgtacgtaagctatgcgatgagttcggcgcactgatgatcctcgatgaagtacaaacgggcatggggcgcacgggcaagatgttcgcctgcgagcatgagaacgtacagccggatatcctctgccttgccaaagcgctcggcggcggcgtgatgccgattggcgcgaccatcgccactgaagaggtgtttagtgttctgttcgacaacccattcctgcataccaccacctttggcggcaacccgctggcctgtgcggcggcgctggcgaccatcaatgtgttgctggagcagaacttaccggctcaggctgagcaaaaaggcgatatgttgctggacggtttccgtcaactggcgcgggaatatcccgatctggtacaggaagcgcgtggtaaagggatgttgatggcgattgagtttgttgataacgaaatcggctataactttgccagcgagatgttccgccagcgcgtactggtggccggaacgctcaataacgccaaaacgatccgcattgaaccgccactgacactgaccattgaacagtgtgaactggtgatcaaagcggcgcgtaaggcgctggcggccatgcgagtaagtgtcgaagaagcgtaatatcaaatcggatggcgatacgacgtcgccatccgatctttttatacgacgcgtacgcccgcaggcatcatccgctccggcgttaacagcacgctttcactgccgtcatcggtttccgcacacaacagcatgcattcgctcgtttcaccacgcattttcgctttttgcagattgcataagaccaccaccgttttccccatcagctcttcttcgctgtagtacggcaccaggctggtcacggtttgcagcgttttttgccccacatcaacctgtacgatgtacagcttgtcggcgttttcatggcgtttcacttccacaatctttccgacgcgcatttccagacgtgcaaaatcagcgtaagccacggtttccattgcttcctcccttagggtaaaattttactaaactatagcaaaagtttttctcaatcctgtaggctaaaaatggagaatgcaggcgtgatcacattcgtgagccgctgtgttaccgttacagcgtcaaagaaacgcgctttatttactgaaaacaggtgacccgataagcacttcctctacaatgggggcgcacatcagggaaagtaaaaaaggtaaacatggcaacactaaaagacatcgcaatcgaagctggcgtatccctggcgacagtatccagggtcttaaatgacgatccgacattgaatgtgaaagaagagacgaaacatcgcattctcgagatcgccgaaaagctggagtacaagaccagtagtgcccgtaaactccagacaggtgcagtcaaccaacaccatattctggctatctacagctaccagcaggagctggagatcaacgatccttactatctggcgatccgccacggcattgaaacccagtgcgaaaagctgggcatcgagctcaccaactgttatgaacacagcggcttaccagacattaaaaacgtcaccggtattttaattgtcggcaaacccacgcccgccctgcgcgccgctgccagcgcgttgaccgacaatatctgttttatcgactttcacgaacccggcagcggttacgatgcggtggatatcgatctggcacgcatcagtaaagaaatcatcgacttctatatcaaccagggcgttaatcgtattggttttattggcggtgaagatgagcctggcaaggcggatattcgtgaggtcgcctttgcggaatatggccgactgaaacaagtggtacgcgaagaggatatctggcgcggcggtttttccagtagcagcggttatgaactggcaaaacaaatgctggcgcgggaagactatccgaaggcactgtttgttgcttccgattccattgctatcggcgtactgcgggcaattcatgaacgaggcctgaacatcccacaggatattagccttatcagcgttaacgatatccccaccgcgcgatttacctttccgccgctctccaccgtgcgcatccattccgagatgatgggaagtcagggcgttaacctggtgtatgaaaaagcccgcgatggtcgcgcgctgccgctgttagtcttcgttcccagcaaattaaaactgcgcggcacgacccgttaaatccccttacacactgtccggcaatcgtttttgccggacagtgctgccgtttattttcgtgatccagttaaagtaaatgcatttacctgctactttttagtaaaaattttactaaactccccagcaattacacaaactaccatcaccatgaatggttccgatttctctctaccgggaggccctatgaatcgctgggaaaacattcagctcacccacgaaaaccgacttgcgccgcgtgcgtacttttttagttatgattctgttgcgcaagcgcgtacctttgcccgcgaaaccagcagcctgtttctgcccttaagcggtcagtggaatttccacttttttgaccatccgctgcaagtaccagaagccttcacctctgagttaatggctgactgggggcatattaccgtccccgccatgtggcaaatggaaggtcacggcaaactgcaatataccgacgaaggttttccgttccccatcgatgtgccgtttgtccccagcgataacccaaccggtgcctatcaacgtattttcaccctcagcgacggctggcagggtaaacagacgctgattaaatttgacggcgtcgaaacctattttgaagtctatgttaacggtcagtatgtgggtttcagcaagggcagtcgcctgaccgcagagtttgacatcagcgcgatggttaaaaccggcgacaacctgttgtgtgtgcgcgtgatgcagtgggcggactctacctacgtggaagaccaggatatgtggtggagtgcggggatcttccgcgatgtttatctggtcggaaaacacctaacgcatattaacgatttcactgtgcgtaccgactttgacgaagcctattgcgatgccacgctttcctgcgaagtggtgctggaaaatctcgccgcctcccctgtcgtcacgacgctggaatataccctgtttgatggcgaacgcgtggtgcacagcagcgccattgatcatttggcaattgaaaaactgaccagcgccagctttgcttttactgtcgaacagccgcagcaatggagtgcagaatccccttatctttaccatctggtcatgacgctgaaagacgccaacggcaacgttctggaagtggtgccacaacgcgttggcttccgtgatatcaaagtgcgcgacggtctgttctggatcaataaccgttatgtgatgctgcacggcgtcaaccgtcacgacaacgatcatcgcaaaggccgcgccgttggaatggatcgcgtcgagaaagatctccagttgatgaagcagcacaatatcaactccgtgcgtaccgctcactacccgaacgatccgcgtttttacgaactgtgtgatatctacggcctgtttgtgatggcggaaaccgacgtcgaaagccacggctttgctaatgtcggcgatattagccgtattaccgacgatccgcagtgggaaaaagtctacgtcgagcgcattgttcgccatatccacgcgcagaaaaaccatccgagcatcatcatctggagcctgggcaatgaatccggctatggctgtaacatccgcgcgatgtaccatgcggcgaaagcgctggatgacacgcgactggtgcattacgaagaagatcgcgatgctgaagtggtcgatattatttccaccatgtacacccgcgtgccgctgatgaatgagtttggtgaatacccgcatccgaagccgcgcatcatctgtgaatatgctcatgcgatggggaacggaccgggcgggctgacggagtaccagaacgtcttctataagcacgattgcattcagggtcattatgtctgggagtggtgcgaccacgggatccaggcacaggacgaccacggcaatgtctggtataaattcggcggcgactacggcgactatcccaacaactataacttctgtcttgatggtttgatctattccgatcagacgccgggaccgggcctgaaagagtacaaacaggttatcgcgccggtaaaaatccacgcgcgggatctgactcgcggcgagttgaaagtcgaaaataaactgtggtttaccacgcttgatgactacaccctgcacgcagaggtgcgcgccgaaggtgaaacgctcgcgacgcagcagattaaactgcgcgacgttgcgccgaacagcgaagcccccttgcagatcacgctgccgcagctggacgcccgcgaagcgttcctcaacattacggtgaccaaagattcccgcacccgctacagcgaagccggacaccctatcgccacttatcagttcccgctgaaggaaaacaccgcgcagccagtgcctttcgcaccaaataatgcgcgtccgctgacgctggaagacgatcgtttgagctgcaccgttcgcggctacaacttcgcgatcaccttcagtaaaatgagtggcaaaccgacatcctggcaggtgaatggcgaaagcctgctgactcgcgagccaaagatcaacttcttcaagccgatgatcgacaaccacaagcaggagtacgaagggctgtggcaaccgaatcatttgcagatcatgcaggaacatctgcgcgactttgccgtagaacagagcgatggtgaagtgctgatcatcagccgcacagttattgccccgccggtgtttgacttcgggatgcgctgcacctacatctggcgcatcgctgccgatggccaggttaacgtggcgctttccggcgagcgttacggcgactatccgcacatcattccgtgcatcggtttcaccatgggaattaacggcgaatacgatcaggtggcgtattacggtcgtggaccgggcgaaaactacgccgacagccagcaggctaacatcatcgatatctggcgcagcaccgtcgatgccatgttcgagaactatcccttcccgcagaacaacggtaaccgtcagcatgtccgctggacggcactgactaaccgccacggtaacggtctgctggtggttccgcagcgcccaattaacttcagcgcctggcactatacccaggaaaacatccacgctgcccagcactgtaacgagctgcagcgcagtgatgacatcaccctgaacctcgatcaccagctgcttggcctcggctccaactcctggggcagcgaggtgctggactcctggcgcgtctggttccgtgacttcagctacggctttacgttgctgccggtttctggcggagaagctaccgcgcaaagcctggcgagctatgagttcggcgcagggttcttttccacgaatttgcacagcgagaataagcaatgaggatcatcgataacttagaacagttccgccagatttacgcctctggcaagaagtggcaacgctgcgttgaagcgattgaaaatatcgacaacattcagcctggcgtcgcccactccatcggtgacagtttgacttaccgcgtggagacagactccgcgaccgatgcgctatttaccgggcatcgacgctattttgaagtgcattactacctgcaagggcagcaaaaaattgaatatgcgccgaaagagacattacaggtagtggaatattatcgtgatgaaactgaccgtgaatatttaaaaggctgcggagaaaccgttgaggtccacgaagggcaaatcgttatttgcgatatccatgaagcgtatcggtttatctgcaataacgcggtcaaaaaagtggttctcaaagtcaccatcgaagatggttatttccataacaaataacaactacggcggcaaaaggagtttgccgccaccgctaccctactcattttcggagatgtgttatgtctgataccaaacgtaatacaatcggcaaattcggcttgctcagcctgacttttgccgccgtttacagctttaacaacgttatcaataataatattgagcttggactggccagcgcaccgatgtttttcctcgcgacgattttttattttattcccttctgtctgatcatcgcagaatttgttagcttaaataaaaacagtgaagccggtgtctacgcgtgggtaaaaagtagcctgggcggacgttgggcatttattactgcctatacctactggttcgtaaacctgttctttttcaccagtctgttgccgcgcgttattgcttatgctagctatgccttcctcggatacgaatatattatgacgccggttgccaccaccattatcagtatggtgctgttcgccttctccacctgggtttccaccaacggggcgaaaatgttggggccaattacctccgtcactagtacgctgatgctgctgttaacgctctcctacattttactggcaggtacggcgctggttggcggcgtacagcctgctgacgccatcaccgttgacgcgatgatcccgaacttcaactgggcgttcctcggcgttaccacctggatctttatggccgcaggtggcgcggagtccgtcgctgtgtacgttaacgacgtcaaaggcggtagcaaaagcttcgttaaagtgatcatcctcgccgggatttttatcggcgtactgtattccgtctccagcgtgctgattaacgtcttcgtcagcagcaaagagttgaaatttaccggcggaagcgtgcaggtattccacggcatggcggcgtattttggtctaccggaagcgttgatgaatcgctttgtcggtctggtgtcctttaccgcgatgttcggttccctgctgatgtggaccgcaacgccggtgaaaattttcttctccgaaatcccggaaggcatctttggtaagaaaaccgtcgaactgaacgaaaacggcgttccggcgcgcgcagcgtggatccagttcctgatcgtcatcccgctgatgattatcccgatgctcggttccaataccgtgcaggatctgatgaatactattattaatatgaccgccgcagcgtccatgcttccgccgttattcatcatgctggcttacctgaatttacgcgccaaattagatcacctgccacgcgatttccgtatgggctcccgccgcaccggtattatcgttgttagtatgctgattgcgatatttgccgtagggtttgtcgctagcacattcccgactggcgcgaatattctgaccatcattttttataacgtcggcggtattgttatcttccttggctttgcgtggtggaaatacagtaaatatataaagggattaacggctgaagagcgccatattgaagcgacgccagccagcaatgttgattaagcagaataataaaaaatgagcaggcattttccctcttcctggatgaggagagggaaaatagtttctgcctttatatttttataattacaacgataaaaggctgtactttttctttagctcatggattaacacaatgaaattaatcactgcaccatgcagagcattacttgctctgccgttttgctacgccttttctgcggcaggagaagaagcacgtccggcagaacatgacgacacaaaaacacccgcaattaccagcacatcttctcctagttttcgtttttacggcgaattaggggttggtggatatatggatttagagggtgagaataaacataaatacagcgacggtacctatattgaaggtggcctggagatgaagtacggctcctggttcggcctgatttacggcgaaggctggaccgtgcaggccgaccacgacggcaatgcctgggtgccagaccatagctggggtggtttcgagggcggaattaaccgtttctatggcggttatcgtaccaatgatggcaccgaaatcatgctcagtctgcgtcaggattccagcctggatgacctgcaatggtggggcgatttcacccccgatctgggctacgtcattcccaatacccgcgacattatgactgcgctgaaggtacagaacttaagcggcaactttcgttatagcgtcaccgcgactcctgccggacatcatgatgaaagcaaagcctggctacattttggcaaatacgatcgctatgacgacaaatacacctatccggcaatgatgaacggttacatccagtatgaccttgccgaaggcatcacctggatgaacggtctggaaatcaccgacggcacaggacagctctatctcacgggcctgctaactcctaactttgccgctcgcgcctggcaccataccggacgcgccgacgggctggacgtaccgggaagtgaaagtgggatgatggtgagcgccatgtatgaagcgttaaagggcgtttatctctccaccgcttacacctacgccaaacatcgccctgaccacgctgacgatgaaaccacctctttcatgcagtttggtatctggtacgaatacggcggcggacgtttcgccacggcttttgatagccgcttctacatgaaaaatgcctctcacgatcccagcgaccaaatcttcctgatgcaatatttctactggtaataaggactgtaatttcatgaaaataaaaactattttaacgccagtaacctgcgctctgctgataagtttttccgcccatgccgctaacgccgacaattataaaaacgtgattaaccgtactggcgcgccgcagtacatgaaggattacgattacgacgatcaccagcgttttaatccgtttttcgatctcggagcctggcatggtcatctgttgccagacggccctaacaccatgggcggctttccgggcgttgcgctgctgacggaagagtacatcaactttatggccagcaatttcgaccgcctgaccgtctggcaggacggcaagaaagtcgactttacgctggaggcatacagtattcccggtgcgctggtgcaaaaactgacagcaaaagatgtgcaagtcgaaatgactctgcgcttcgccacgccgcgcacgagtctactggaaaccaaaatcaccagcaataaaccgctggatctggtgtgggacggcgaactgctggaaaaactggaagcgaaagaagggaaaccgctttccgataaaaccattgctggcgaataccctgactatcagcgcaaaatcagcgccacccgtgatggcctgaaagtcacctttggcaaagtgcgcgccacctgggatctgctgacctccggcgaaagcgaatatcaggtgcataaatccctgccggtgcagactgaaatcaacggtaatcgctttaccagtaaggcgcatatcaacggtagcaccacgctctacaccacctattcccatctgctgaccgctcaggaagttagcaaagagcaaatgcagatccgcgatattctggcgcgtccggcgttttatctcaccgccagccagcaacgctgggaagaatacctgaagaaagggttaaccaatccggatgcgacgccggaacagacgcgcgtcgcggtgaaagcgatcgaaacgctcaacggtaactggcgcagtccgggcggtgcggtgaaatttaacaccgttacaccgagcgtgaccgggcgctggttctccggcaatcagacctggccgtgggatacctggaagcaggcgtttgcgatggcgcatttcaatccggacatcgccaaagagaatatccgcgcggtcttctcctggcagatccagcctggcgatagcgtgcgtccgcaggatgtgggctttgtccccgacctgatagcgtggaaccttagccccgagcgtggtggcgatggcggcaactggaacgaacgtaataccaaacccagccttgccgcctggagcgtgatggaagtgtataacgtcacccaagataaaacctgggtggcagagatgtacccgaaactggtggcctatcacgactggtggttacgtaaccgcgatcacaacggcaacggcgtgccggaatatggcgcgacccgcgacaaagcccacaacactgagagcggcgagatgctgtttacggtgaaaaaaggcgataaagaagagacgcagtctgggctgaacaactacgcccgcgtggtggagaaaggccagtacgacagtctggaaattccggcacaggttgctgcaagctgggaaagcgggcgtgatgatgccgccgtctttgggtttatcgacaaagaacagttggataaatatgtcgctaatggcggcaaacgtagcgactggacggtgaaattcgccgaaaaccgcagtcaggacggaacgttgctgggctacagcctattgcaggagagcgtggatcaggccagctatatgtacagcgataaccattatctggcggagatggcaaccatcctcggtaagccagaagaggccaaacgctatcgccagttggcacagcagctcgcggactacatcaacacctgtatgttcgacccgactacccagttctactatgacgtacgtattgaagataaaccactggcgaacggctgcgcgggcaaaccgattgttgagcgcggtaaagggccggaaggctggagcccgctgtttaacggtgcggcaacgcaggccaatgccgacgcggtggtgaaggtgatgctcgatcctaaagagttcaacacctttgtcccgctgggaacggcggcgttaaccaatccggcttttggcgctgatatctactggcgtgggcgcgtatgggtggatcagttctggtttggtctgaaagggatggagcgttacggttatcgtgatgatgccctgaagctggcggatacgttcttccggcacgccaaagggttaaccgccgatggaccaattcaggaaaattacaacccgctgacaggcgcacagcaaggcgcaccaaatttctcctggagtgccgcgcatttgtatatgttgtataacgattttttccgtaagcaataatttgcaactgctggcggatgcggcgtaaacgccttatccgccctacatgtgcaatcctcctggccggataaaacgcggcaagcgttgcatccggcaactgcaccgcgccactggcggatgcggcgtgaacgccttatccgccctacatgtgtgttcccgtaggtcggataagacgcgacaagcgtcgcatccggcatctgcaccgcgccactggcggatgcggcgtggacgccttatccgccctacatgtgcaattccgtaacctggataaaacgcgacaagcgtcgcatccggcgttatcaccgggcgtattctttttgaatcccatcacaaaccccgcactccccttttcccttttctccggcgacggctaaattagaactcatccgaccacataacaattattttacatactggacaattttatgagctacccgagcctgttcgccccgctggatttaggttttaccacgttaaaaaaccgcgtgttgatgggcagtatgcacaccgggctggaggaatacccggacggtgccgagcggctggcagcgttttatgccgaacgcgcccgtcacggcgtggcgctgattgtcagcggcggcattgcaccagatttaacaggcgttggcatggaaggtggcgcaatgctcaacgacgccagccagatcccacaccatcgcaccattaccgaagcggtacatcaggaaggcggcaaaatagccctgcaaattttgcataccgggcgctacagctaccaaccgcatctggtcgccccgtccgcattgcaggcccccatcaaccgtttcgtgccccatgagttaagccatgaagagatcctgcaactgatcgacaatttcgcccgctgcgcgcaactggcgcgggaggcaggatacgacggtgtagaggtgatgggttccgaagggtatttgatcaacgaatttctgacgctgcgcaccaatcagcgtagtgaccagtggggcggcgattaccgcaaccggatgcgatttgccgtagaagtagtgcgtgcggtgcgcgaacgcgtcggcaacgacttcattattatctaccgactgagcatgctcgacctggtcgaagacggcgggacttttgccgaaacggtagagctggcgcaggccattgaagcggcgggcgcgaccattatcaacaccggcattggctggcatgaagcacgtattccgaccattgccacgcccgtgccgcgcggcgcatttagctgggtcacgcgcaaactgaaaggccacgtcagcctgccgctggtaaccaccaaccggattaacgatccgcaggttgccgacgatattctcagccgcggcgatgccgatatggtaagcatggcgcgaccgtttcttgctgatgcggagctgctgagtaaagcgcaaagcggacgagccgatgagatcaacacttgtattggctgcaatcaggcctgtctcgatcaaatcttcgttggcaaagtcaccagctgcctggtgaatcctcgcgcctgccacgaaaccaaaatgccaatccttcccgccgtgcagaaaaaaaatctggcggtggtcggtgcgggacctgctgggctggcgtttgccattaacgcggcggcgcgtgggcatcaggtaacattgtttgacgctcatagcgagattggcgggcagtttaatatcgccaaacagatccccggcaaagaggagttttacgaaacgctgcgctattaccgccggatgatcgaagtgacgggcgtgacgctaaaactcaatcacaccgtgacggcggatcagttacaggctttcgatgaaacgatcctcgccagtgggatcgtgccgcgcactccgcccatcgacgggatcgatcatccgaaggtattgagttatctcgatgtactgcgcgacaaagcgccggttggcaacaaagttgccatcatcggttgtggcgggattggttttgatacggcgatgtatttaagtcagccgggcgaatccaccagccagaatatcgccgggttctgtaatgaatgggggatcgacagtagcctacaacaggctggtggcttaagcccgcagggaatgcagatcccccgtagcccacggcagattgtgatgctccagcgcaaagccagcaaaccaggacaggggttaggcaaaaccaccggctggatccatcgcaccaccctgctcagccggggtgtgaaaatgatcccaggcgtaagttatcagaagattgacgatgacgggctgcatgtggtgatcaacggcgaaacgcaggtattagcagtggacaatgtggtgatctgcgcagggcaagagccaaaccgcgcgctggcgcaaccgctgattgatagcgggaaaacggtgcatttaattggcggctgcgatgtggctatggagctggacgcacgacgggcaattgcccagggaacacggctggcgctggagatttaaatcgttatttgaagcgccggatgcaacgcatccggcacgtcgcgttaatcaataaacaaggcgggagaaatgccgaatcgcgttgccaattttttagcgtgttccagcgttaatttcctcttcccgctcaaaacgcgactcaccatagatttactgccaatttccggcagatcggaaagggttaaaccatattgatccataagggtacgaatcacggctataccgccaggcatggcttgagccatggcattaaattccgcaaattcgggcgcactttcttcccacgcggttattttggcacacaccagatccagcaaggggttttcaggatcgttgagcagcagatgatctaccagttccagcgcctgggtgtattgttcctcgttctgaatacccgccagaaaaggtgccacagcagttagcttttctcctgcttgcaagatgtcggcaatcgcaatcattttttccccttagtacgatgaacagcggtaaagaaatcgtattctttatgcgtcataacttcacgtatgtagcacttttggctttcaaaaaagaccattgctacaacacgtaattcattgcccccaacattgaaaacataatgcttatccagatatttgaagttatccagagatgggaatactgcttttaaactctcaggttttttgaaatatcccttagcaatcgtgttccccagagccaccaactccgttttatgttgcgggtatttttccgcagcatctttcaatgctttttgagttatcaggtgcattcttcatcacgtccgttgacaaattggcaatatgataacatccgttgccagattggcaacggatgaatttatctgtgtgacggaagaataaacgtagaaaaacgctaaacaagagaatgtagacgatggtgacagggattttttgttttatggaagcgcgattccagaactgggcagacattgccggatgcgacgcttgccgcgtcttatccggcctggagtaacgtgctgaacgtaggccggataaggcgtttacgccgcatccggcaggtaactcccaatcttaccgacgacgtcccagcttcaccgctttcagtaccacaaatttattattcgtcgcaatagtggtgcagttgccgaaaatcttcttcagtttatggaagtaatccaggtgacggttggcaacgatatacagctcgccgttgattttcaggcagcggcgggcgtggtggaacatctcccaggcgacgttatcggtcagcgcatgttgttggtgaaacggcgggttgcagagcacagcattaaagcggaaaggctccacgccggagagcgcgttgttgatcataaactcgcagcgatccaacgcctctggcatgttggtttcaacgttcaaacggctggaagcaaccgccatcgggctttcatcgacaaacaccactttcgcctgcgggtttttatcaagcagcgtcagaccaataacgccattaccgcaaccgagatcgacaatctccccttcgagattctctggcagatgttgcataaagaagcgcgcgccgatatcaagcccggtgcgggagaagacattcgcatggttgtggatagtccagtcagtaccttccagcttccagctaacggtctgcggcgcatcggccagctgcggttcattgaaagtgcaattaatcaggcgcgcttttttccatgccagcgtggtggtggttgggccgagcactttttcgaacagttccagcgtggaagtgtgaatgtcacgggccttggcaccggcaataatacgtgtatcgctcgtgaccactttgcgcagcgcacgcagttgctgttccagcaatgccagtgttttcggcactttgatcagcaccacacccggctgttgcgggtagtcggcggtgctgtcgagaaacttcacgctgctctcatcaatcccgttgaggcgtaaattctcgcgcgtcgccagttcactgatgtaactgtcgccaatgctgtacggcttatgttccgccagtgcgcagcttaacgcaccaaaggcatcattcaggatcaacaccgggccgcggatttctgtgtcgtccaactgttgcagcaaatattcatccgccgcttcccacgcctgtagcgggttaacgtcatccgtcgccggaaaacgttgtagtgtcagactacggaaaccgttgtctaagtggctcatcggccctcctgaatgataaaatttcgacattgcccctgaaaagggtgcgtgagtataccctttttctctttttcgtgggcggttatgagcaatcttacttatcttcagggttatcccgagcagctactttcccaggtgcgaacactgattaacgaacagcgtctgggcgatgtgctggcaaaacgctatccgggaacacacgactacgccaccgataaagccctctggcaatatactcaggatctgaaaaatcagtttctgcgtaatgccccgccgatcaataaagtgatgtatgacaataagatccatgtgctaaaaaacgcgctcgggttacataccgctgtttctcgtgtgcagggcggcaagctgaaagcaaaggtggagatccgcgtcgctaccgtgtttcgcaacgcgccggaaccgtttttgcgcatgatcgtggtgcacgagctggcgcacctgaaggagaaagagcataacaaagcgttttaccagttgtgttgtcatatggaaccccagtaccaccagcttgagttcgacacccgactgtggctaacgcagttgagccttgggcagaacaaaatctgaaaatgatgtcaggcgttatcttttctttctttagcgcctaaaatcgacctcccccctttcgttaaggataacgaccatgctgcgcgcatttgcccgccttcttctccgtatttgtttttctcgccggactctaaagattgcctgcttactgttacttgtggcaggagcgaccatccttatcgccgatcgcgtaatggtcaacgccagcaaacagctgacctggagcgatgtcaacgccgttccggcgcgtaacgtgggtttattgctgggggcgaggccgggtaatcgctactttacccgacgtattgataccgcagcagcgttgtaccacgccggaaaagtgaaatggctgctggtaagtggcgataacggacgtaaaaattacgatgaagcaagtggtatgcagcaggctttgatcgctaaaggcgtaccagcaaaagtgatcttctgcgactatgccggattcagtacgctggatagcgtagtgcgtgccaaaaaggtttttggtgaaaaccatatcaccattatcagccaagaatttcataatcaacgcgccatctggctggcaaaacagtacggcatcgacgctatcggttttaacgcgccagacctcaatatgaagcacggtttttatactcaactgcgggagaaactcgctcgtgtcagcgccgtgattgacgccaaaatcctccatcgccagccgaaatatctcgggcctagcgtcatgattgggccgtttagtgagcatggctgtccggcgcagaaataatgcgtatctgcgcacgtcgaagatgaaaaaggcgtgctacattgacgacagaatccctttatggagtatccacgcgttatgatacgtttcgctgtgattggtacgaactggatcactcgccagttcgtcgaggccgcccatgagagcggtaaatacaagttaaccgccgtatattcccgcagccttgaacaggcccagcacttcgccaatgatttttctgtcgagcatctgtttaccagcctggaagcgatggcggaaagcgatgccattgacgcggtgtatattgccagcccgaattccctgcatttttcccagacacaacttttccttagccataaaattaatgtgatttgcgagaaaccgctggcgagcaatctggcggaagtggatgccgccattgcctgtgcgcgggaaaatcaggtggtgctgtttgaggcatttaaaaccgcctgcctgccgaactttcatttgttgcgccaggcgctgccgaaagtcggcaaactgcggaaagtctttttcaactattgccagtattccagccggtatcaacgttacctggatggtgagaatcccaacacctttaatccggcattctctaacggtagtattatggatatcggtttttactgtctggcgagcgcggtggcgttatttggtgagccgaaaagcgtgcaggcaaccgccagtttgctggcaagcggcgttgacgcccagggcgtggtggtgatggattacggtgatttcagcgtcaccttgcagcacagtaaagtcagtgattctgtcctggcgagcgagattcagggcgaagcaggaagcctggtgattgaaaaactgtctgaatgccagaaagtgtgcttcgtgccgcgtggcagccaaatgcaggatctcacccagccgcagcatattaataccatgctctacgaagcagagctgttcgctaccctggtggatgagcatctggtggatcatccagggctggcggtcagtcgcatcaccgccaaactgctgaccgagatccgccgccagactggggtgatttttccggcagatagcgtaaaactataattgccaaagtaaaacagtgtaaaaggtatgtaacagaccattgactggctgaatggtctgtcatactttgttacctgcaaaggggagtaacttcattgccggtcgatcgtcattacgatgtgtgaaaaaacacatccggtcaccgggcaacccgaaaggaatacgcagacgtattccttttttgttgtaagtgagaccttgccggaaggcgaggtctatgcataaaaagcagcggctgacgtcttccgacgttggccgtttttttatgtgtaaggaacttctatgaatactgtcggcacgccgttgctatggggcggattcgctgttgttgtcgccattatgctggctatcgacctgttgttgcaggggcgtcgtggggcacatgccatgaccatgaaacaggctgcggcctggagcctggtctgggtgacgctgagcttactgtttaacgccgctttctggtggtatctggtgcaaaccgaaggtcgcgccgttgccgatccacaggcactggcctttctcacaggttatctgattgagaaaagcctggcggtcgataacgtctttgtctggctgatgttgttcagctatttctctgttccggcggcattacaacgccgcgtgctggtgtatggcgtgctcggggcgattgttctgcgtaccatcatgatcttcactggcagctggctaattagccagttcgactggatcctgtatatcttcggtgccttcctgctgtttaccggcgtgaagatggcgctcgcccatgaagatgaaagtggcattggcgacaagccgctggtgcgctggctacgcggtcatttgcgcatgaccgacaccatcgacaacgagcatttctttgtgcgtaagaatggattgctgtacgccacaccgctgatgctggtactgattctggtggaattgagcgacgtgattttcgccgtggatagcattccggctatcttcgccgtgaccactgacccgttcattgtgctgaccagtaacctgtttgcgatcctcggcctgcgtgcgatgtatttcctgctggcgggcgtagcagagcgtttcagcatgctcaaatatggcctggcggtgattctggtgtttatcggtatcaagatgctgattgtcgacttctaccatattccaatcgccgtcagcctgggcgtggtgtttggcattctggtgatgacgtttattatcaacgcctgggtgaattatcggcatgataagcagcggggtggataatttttaatctgcctaagccgtgtaccctgtcattaacatgagcaccgttttctccctctcccttccagggagagggtcggggtgagggtaatttttcgcaccgatgctggcctgttcccctcaccctaaccctctccccaaacggggcgaggggactgaccgagtccttttttgatgttgtcatcagtctggaagccgcacgttggctttatttttatgtcaaagaaatgtaaccattaagtttcaaaatatgacctctctttaaaatccagcatttttcgcttcccgaagctgtaactttccttatactcgaccttgcaaacactttgttacatcctgaaagatgcgtcgacagaacgcaccagggatgtgcgacaacacaatgaaaggatcgaaaaatgactacgcaacgtagtccggggctattccggcgtctggctcatggcagcctggtaaaacaaatcctggtcggccttgttctggggattcttctggcatggatcagtaaacccgcggcggaagctgttggtctgttaggtactttgttcgtcggcgcactgaaagccgttgcccccatcctggtgttgatgctggtgatggcatctattgctaaccaccagcacgggcagaaaaccaatatccgccctattttgttcctctatctactgggcaccttctctgctgctctggccgcagtagtcttcagctttgccttcccttctaccctgcatttatccagtagcgcgggtgatattagcccgccgagtggcattgtcgaagtgatgcgcgggctggtaatgagcatggtttccaaccccatcgacgcgctgctgaaaggtaactacatcgggattctggtgtgggcgatcggcctcggcttcgcactgcgtcacggtaacgagaccaccaaaaacctggttaacgatatgagcaatgccgttacctttatggtgaaactggtcattcgcttcgcaccgattggtatttttgggctggtttcttctaccctggcaaccaccggtttctccacactgtggggctacgcgcaactgctggtcgtgctggttggctgtatgttactggtggcgctggtggttaacccattgctggtgtggtggaaaattcgtcgtaacccgttcccgctggtgctgctgtgcctgcgcgaaagcggtgtgtatgccttcttcacccgcagctctgcagcgaacattccggtgaatatggcgctgtgtgaaaagctgaatctggatcgcgatacctattccgtttctattccgctgggagccaccatcaatatggcgggcgcagcaatcactattaccgtgttgacgctggctgcggttaatacgctgggtattccggtcgatctgcccacggcgctgctgttgagcgtggtggcttctctgtgtgcctgtggcgcatccggcgtggcgggggggtctctgctgctgatcccactggcctgtaatatgttcggtattagcaacgatatcgccatgcaggtggttgccgtcggctttatcatcggcgtattgcaggactcttgcgaaaccgcgctgaactctagtactgacgtgctgttcactgcggcagcttgccaggcagaagacgatcgtctggcaaatagcgccctgcgtaattaattgtttaacccctttcgtctacggcggaaggggttttctcaactttaaacggatcaattccccttttctgcatccgccagaaacgaatgatattcaggccattcataagcagaaaactaccctcaatcatcgtgccgcctatgctccccgcccagaagttgtgaatcacccagcaacacgtactaaaccacattacgcagcgcatggtcagccctttacagcagaatagcgcccaggtactgacaatcgtgccgataaccggcaatagttcgacaggatgatggaacttcgcgaggccaattccgccagtcagcacaataaaaatcgccattacccataagctgcgcgtgcgtaaggtaatcaatgtacgaatggcattaaggatggcactggcaccagcgggataggtgcccagaagaaaaaaatgtacgccaataacggcgctatagacgctaagctgctttttgaagcgacgttcgtcacgattgaaaaatgttgtgataccaatcagaaaggcgatgacacccacgccctgggccagccaatacgcggtcatgataaatccttagcaggtatggaaaagcaaacggcgcttcacattatgaaacgccgttttttattaacaactcatttcgactttatagcgttacgccgcttttgaagatcgccagttcgcggaagtcgttacgctcgttacaggtttgcttaccgttggcaaactcaacgatggtgtcgataaattcttccagcaactgcggcatcgctttaccgtggatcaactgacccgcgtcaaagtcgatccagtgttttttcttcgccgccagttcactgttggtggcgattttcaccgtcggcacaaatccaccatacggcgtgccacgaccagtactgaacagcaccatatggcagcccgcacccgccagggcgctggtcgctacggcatcgttacccggcgcacttaacaagttcagccctggcgttttcagacgctcgccgtaacgcagcacgtcaaccacgacgctggaacccgctttctgggtacagccaagacttttgtcttccagcgtggtgataccgcccgctttgttccccgggcttgggttttcatagatcggctgatcatgggcaataaagtactgtttgaagtcgttgaccatggtgaccagtttttcaaacgttgcttcgtcgcggcaatggtccatcagcaactgctctgcgccaaacatctccggcacttcggtcagtacggtagtaccgccgttagcaatcacgtagtcagagaaacgccccagcatcgggttagcagtaataccagaaagaccgtcagaaccaccgcactccagaccaaacttcagttcgctgagtttgcctggctcgcgtttatcgttgcgcatcacgttatacagctgatgcaaatgctcgattccggcttcgatctcatcatcctgctgttggcagatcatgaaatgaacgcgttcaggatcgatatcgcccagcgtttcacggaatgcggcaacctggttgttttcacagcccagaccaatcaccagcactgcgcctgcgttcgggtggcgcaccatgttttgcagcatggtgcgggtattaatgtgatcgtcgcccagctgactgcagccgtaggtgtggctgaagaggaacacgccgtcagtaccttcggcgttgttggtctctttcagaaaacggttctggatctgccgcgcgatgccgttgacacagcccacggttggcaggatccacagctcattacgcaccccgacatcgccgttagcgcgacgatagatctgcacttcacgatctgccgcttgcgcaggcagatcctgaaaatcaggttgatagcgatactgatccagatcgctcagattcgtgcgcgtattgtgggcgtgaacgtgaacacctgccgcaatatccgccaatgcataaccaatcggcaggccatatttgatgacattggccccttttgcgatatccgttaacgcaaatttatgtccacgagcaacatcctggcgcagcgtaacagtctggttatcgacactgacttctgtgccttcagccaaatctgctaaagcgaccgcgacgttatccagcgcatggatcttgatgtattgcatatcaaccccagaccttagttcagttcaatggcgaagtagtcacgcgcattgttaaagcaaatatttttcaccatctcgcccagcaggttgatgtccgccggtgcttcgcccgcttccacccagcgaccgatcatctggcacagaatgcggcggaagtattcgtgacgggtgtaactcaggaagctacggctgtcagtcagcataccgacaaagcggctcagcagaccgagctgcgccagttgggtcatctgacgttccataccgtctttctgatcgttaaaccaccagccggaaccgaactgcattttgcccggcataccttcgccctggaagttaccgatcatggtgcccagcacttcgttatcgcgcgggttcaggcagtacagaatggttttcggcagcaggttttcttcattctgcttgctcagcaacttagacagctcttccgccatcggacggtcgttgatggagtcaaagcctacatccggccccagcagtttgaactgacgcaggttgttattacgcagcgcgccaatgtggtactgctgtacccagccgcgacgtgcatattcggcaccaaggaacaccagtaccgcagttttgaactgcgccacttcgtgctcgctcagggtttcgccagccagacggcgcgccagaatgctgtccagttccgcttcgttcgcttcagcaaacatcaccacatccagcgcgtggtcagacactttacagccgtgagcggcgaagtgatccagacgtttggtcagggcagtttgcaggtcagcaaagcggcgaatgtcggtatcggaaacttcgcccagcttcgccatgtagtcgttaaaggtcgcctgttcgatgttgaaggctttgtccggacgccagctcggcagcactttgatggtgaaagagccgtctttggcgatctctgcgtgatgctccagagaatcgatcgggtcatcggtggtgccgaccattttcacgttcatctgctgcatgatgccgcgcgcggagaagttatcctgcgccagcagttcgttacattcgttccagatttcatcggcagtactcggagaaagcaatttgccagtgataccaaacggacggcgcagttcgaggtgcgtccagtggtataacgggttgccgatagtgtgcggaacagtcgccgcccaggcgtcaaatttttcacggtcagacgcatcaccggtacacagacgctcggccacaccgttggtacgcatagcgcgccatttgtagtgatcgcctttcagccagatgtcatacaggtttttaaaacgatagtcttccgcaatctgctgcggcggcaaatggcaatggtaatcgaaaatcggctggtcttttgcgtagtcgtgatacagacggcgggcaaattcggtatctaacaggaaatcttcagtcataaacggagtcattttcgtcttcctctcaacgagtgagctagcttgcttatggtgcgatgctgacaaagttatcacaccaatttccagagtccgaagatattttcgtgagttagatcaataaacgtagttaaaaaaattactctcaaagtggtaaatctcgctgcaggccgcgccagtactggccttgctgtcgtcaggtaatgtccctacaaatattcccacatttgtgatggctctcaccttttaaagttgtatgacaagttatctttctgccgtcgcaaatcataagtcgacggaatgcaaattgccgattcattcatttgttagatgaatcgggttaaccggtacggaagccgaattagcacgaaactttcatggcaacgttcggggcgtgccggttttttttcggttacccggtcgtaactaacatcttcagcctctggcgggatgatggccgcgcttcctgcggatataacaaaacgatgaggttttacatgcgtaaaattaaagggttacgttggtatatgatcgcactggtgacgctcggcaccgtgcttggttacctgacgcgtaacactgtggcggcagctgcgccaactctgatggaagagttaaacatctccacccaacagtattcctatatcatcgcagcctattctgctgcttatacggtcatgcaaccggtagcaggttatgtactggatgtgctgggtacgaaaatcggttatgcaatgtttgctgtgctgtgggccgtgttctgtggtgcaaccgcgctggcaggtagctggggtggcctggctgttgctcgtggtgcggtcggtgccgcggaagcagcgatgatcccggcgggtctgaaagccagctccgaatggttcccggcgaaagagcgttccatcgcagtaggctactttaacgtaggttctagcattggtgcgatgattgcgccgccgctggtggtatgggcaatcgtaatgcacagctggcagatggcatttatcatctccggtgcattgagctttatctgggcgatggcatggctgattttctataaacatccgcgcgaccagaagcatctgaccgatgaagaacgcgactatattattaatggtcaggaagcccagcaccaggtgagcacggcgaagaaaatgtccgttggtcagatcctgcgtaaccgtcagttctggggtatcgcgctgccgcgtttcctggcagaaccggcctggggtacttttaacgcgtggatcccgctgttcatgtttaaagtttacggctttaacctgaaagagatcgcgatgttcgcctggatgccgatgctgtttgctgacctcggttgtatcctcggtggttacctgccgccgctgttccagcgttggtttggtgtgaacctgatcgtttcccgtaagatggtcgtaacgctgggtgcagtgctgatgattggcccgggtatgatcggcctgttcaccaacccgtatgtcgcaattatgctgctgtgtatcggtggttttgcccaccaggcactgtctggcgcgctgattacgctctcttccgatgtgtttggtcgtaacgaagtggcaacggcaaacggtttaaccgggatgtccgcatggctggcaagtacgctgtttgcgctggttgtcggtgcactggctgacaccatcggcttcagcccgctgttcgcagttctggcagtgttcgacctgttaggtgcgctggttatctggaccgtgttgcagaacaaaccggcgattgaggtggcgcaggaaacacataacgatcccgcaccgcaacattaacgtttcgtgtaagttttagtttcccttcaaagccgccttctcaggcggctttttcatcactgcgagtagagctaaactcgcaaaagtggtataacaaatatagtctgccgtatcatgcctggagcgcatatggaaatcactgaaccacgccgtttgtatcaacaacttgccgctgacctgaaagagcgcatcgaacagggcgtctatctggtgggtgataaactgcctgcagaacgctttattgccgatgaaaagaacgtcagccgtacggtagttcgtgaagccatcatcatgctggaagttgaaggctatgtcgaagtgcgtaaaggtagtggtattcatgtggtttccaaccagccgcgccatcagcaggcggctgacaataatatggaattcgccaattacggtccgtttgagttgcttcaggctcgccagctcatcgaaagtaatattgccgaattcgcggcaactcaggtaacgaaacaggacatcatgaaactgatggccattcaggaacaggcgcgcggcgaacaatgcttccgtgattccgagtgggatttgcagttccacattcaggtcgctctggcgacgcagaactccgccctggcggctatcgtggaaaaaatgtggacccagcgtagtcataacccgtactggaaaaaactgcacgaacacattgattcccgtaccgtcgataactggtgtgatgaccacgatcaaatcctcaaggcgctgattcgcaaagatcctcatgctgctaagctggcaatgtggcagcatctggaaaacaccaagatcatgttatttaacgaaaccagcgacgacttcgagttcaatgccgaccgctatctattcgccgaaaacccggtggtgcatctcgatacagccaccagcggcagtaaatgaaattcctgtccgacaggcgctgcaatgcgcctgtttgtctcgtcggtaagcgaaaagtataaagtgtcagcctgtgtaaatcctctcgccaccctcccctgcattcagcaaaatcagactccacggacatgtaattttgataacgaacaacgttgacctttgttacaattagattcaatttgaatttatgtttttgaatgctttcttatctcacgatttaacagggaatagttcaggctgtgttgatgtatcaaacccgcagaacataccaaaacagcaataacattgcggtagtgcatcttttaaaaccagcgtggcgttaaccgattcaccaggaataatgaatggaacttttgacccaattgctgcaagccctgtgggcgcaggattttgaaaccctggccaatccaagcatgattggcatgttgtattttgtcttgtttgtaattttgttccttgaaaacggcttgcttccggcggcctttttaccgggcgacagtttactggtattggtcggcgtgttgattgcgaaaggcgcgatgggctatccgcaaacgattctgctgctgaccgttgccgccagcctcggctgctgggtcagctatattcaggggcgatggctgggcaatacccgcaccgtacaaaactggctatctcatttacccgcgcattatcatcaacgcgcacaccatctttttcataaacacggtttaagcgcgctgttaattggtcgctttattgcgtttgtcagaacactgctgccgacgattgccgggttaagtgggctgaataacgcgcgctttcagtttttcaactggatgagcggtctgctgtgggtattgatcctgacaactctgggttacatgctcggcaaaacgccggtatttttaaagtacgaggaccagctgatgagttgcctgatgctgctcccggtggtgctgctggtgtttggcctggcaggttctctggtcgtgttatggaaaaagaaatatggaaatcgggggtaagggatgcaaatacctcgcatgagccttcgccagctagcctggtccggcgctgttttacttctggtcggcacgctgttgctggcctggtccgcggttcgccagcaagagtctacgctggcgattcgtgccgttcatcaaggcacaacgatgccagacggttttagtatctggcatcaccttgacgctcatggcattcctttcaaaagtatcacccccaaaaacgacactctgttaattacatttgactccagcgaccagagcgccgccgcaaaagcggtcctcgacagaacattgccccatggctacatcattgcgcagcaggacaataacagtcaggctatgcagtggctgacccggttacgggataactctcatcgcttcggataacttcctgttatccgaaacatatcactcactttggtgatttcaccgtaactgtctatgattaatgaggcggtggttaacactaccgcttcgttgtctggacaatcgttcctttgtaataggtccgaatcacaatggaaggttcaagaatgaaataccgcatcgctttagctgtttctctctttgctcttagtgccggtagttatgccactaccctgtgtcaggaaaaggagcaaaatatccttaaggagatcagctatgccgaaaaacaccaaaaccagaatcgtattgacggtctgaataaagccctgagtgaagtccgggccaactgtagtgatagccagctgcgtgccgatcatcagaagaaaatcgcaaagcagaaagatgaggtggcggaacgccagcaagatttagccgaggcgaagcaaaaaggcgatgccgataagattgccaaacgcgaacggaaactggcagaagcgcaggaagagctgaaaaagctggaagcgcgcgactactaactcacaatagtcactacttactcacctggagaaaactatgagcaaagaacacactacggaacatctgcgtgctgagttgaaatccctttccgatacgctggaagaggtgcttagcagttctggcgagaagagcaaagaagagttgagtaagattcgtagcaaagcggagcaggcactgaaacagagccgttatcgcctgggtgaaaccggtgatgccattgccaaacaaacccgtgtcgcggcggcgcgtgccgatgagtatgtgcgcgaaaatccgtggacgggcgtgggcattggcgctgcaatcggtgtagtgctcggcgttctgctgagccgtcgttaattatggcggacactcatcacgcacaagggcccggtaaaagcgttctgggcatcgggcagcgaattgtttctatcatggttgaaatggtagagacacgtctgcggctggcggtggtggagctggaagaggaaaaagcgaatctctttcaacttttactgatgctgggcctgacgatgcttttcgctgcatttggtcttatgagcctgatggtgctaattatttgggcggttgacccgcaatatcgcctgaatgcgatgattgccaccaccgtggtgttgctgctactggcactgattggcggtatctggacgctacgtaaaagccgtaagtctacgttgctgcgccatacacgccatgagttagcaaacgatcggcagctgctcgaggaggagtcccgtgagcagtaaagtcgaacgtgaacgacgtaaggcgcaactgcttagccagatccagcaacaacggctggatctttccgccagtcgtcgtgaatggctggagacaacaggcgcttacgatcgtcgctggaatatgctgctaagtctgcgctcctgggcgctggttggcagtagcgtgatggcgatctggacgattcgccatcctaatatgctggtccgctgggccagacgcggttttggcgtatggagcgcctggcgtctggttaaaacgaccctcaagcagcaacagcttcgcggttaacttccctctggccggagccattccggccttatccctcaaattttttgaagatttttgacagttttccttgctaacaatcatcattcaccacgtttatgattctctccatcgacagcaacgacgctaataccgcgccattgcacaaaaaaacaatcagcagcctgagtggcgcagtggagagtatgatgaaaaaattagaagatgttggtgtactggtagcgcgcattttaatgccgattctgtttattaccgctggctggggaaaaattactggctacgcgggtacccaacaatatatggaagcaatgggcgtcccgggttttatgctgccactggtgattctgcttgagtttggtggtggtctggcaatcctgttcggtttcctgactcgcaccacagccctgtttactgcgggctttacgctgctgacggcatttttatttcacagcaactttgctgaaggcgtcaacagcctgatgttcatgaaaaacctgacaatttctggcggattcctgctgctggcaattaccggtccgggcgcgtatagcatcgaccgcctgctgaataaaaagtggtaagcacgcgctatacttaacgataaaaaacgaggaggaagctcctcgtttttgctattggaggagagaaaaatgggtcaactgattgacggcgtctggcatgacacctggtacgataccaaatctaccggcggtaaatttcaacgtagtgcttccgcatttcgtaactggctcactgccgatggcgctcctggccccactggcacaggcggttttatcgcagagaaagatcgttatcatctctatgttagtctcgcctgcccgtgggcgcaccgcacgctgatcatgcgcaaactcaaaggactggaaccgtttatttccgtttccgtagtgaacccgctgatgctggaaaacggttggacctttgatgacagttttccgggagcaaccggagacacgctctatcaaaatgaatttctgtatcagctttatctccacgccgatccacactacagcggacgagttactgttcccgtgctgtgggacaaaaagaaccacaccatcgtcagcaacgaaagtgcagaaatcatccgcatgttcaataccgcgtttgatgcgctgggcgcgaaagcgggtgattactaccctccagccctgcaaacaaaaattgacgaacttaacggctggatttatgacaccgttaacaacggcgtgtataaagctggttttgccaccagccaggaagcttacgacgaggcggtggcgaaagtgtttgaaagcctggcacgactggagcagattttaggccagcatcgttacctgaccggcaaccagctaaccgaagccgatattcgcctgtggactacgctggtgcgttttgatccggtgtatgtgacccacttcaagtgtgataagcaccgcatcagcgattacctgaatctgtacggttttctgcgcgatatctaccagatgccggggatcgccgaaacagtcaatttcgatcatatccgtaatcattacttccgcagccataagaccatcaaccctacggggattattagtattggtccgtggcaggatctcgatgaaccgcatggacgagatgttcgcttcggttaaaaaaaggcaccttacgaggtgcctctgataattagctaagtgcatgttgttcatgtcggatgtggcatgaacgccttatctgacatacaaaacattgtacattcaatagattgcataacccgcgcagaccagataagcgtagcgcatctggcgattttgcgcttgtcatcagtcttagcgcgccttcacggcactttattaattccttgaacgaatatttactgccatttcattcacgtctattcttaatttgctgctttaaaaacaagtgattgagcaaaattgaggcaaaaatggactggtatctgaaagtactaaaaaattatgtcggtttccggggtcgtgcgcggcgcaaagagtactggatgtttattctggtcaacatcatctttacgttcgtgctggggctgctggataaaatgttaggctggcaacgcgctggtggcgaaggcatcctgacgacaatctacggtattctggtgtttttaccgtggtgggcggttcagttccgccgcctgcacgacaccgaccgcagcgcgtggtgggcactgctattcttaatcccgtttatcggctggcttattatcatcgtctttaactgccaggcgggtacgccaggcgaaaaccgctttggaccagatccaaaactggaaccttaaaacaaatctgctcgccggatgtctgactcatccggcttttatcattatgttgatgaatgaataatttactaatgtttatttaaaatatttcaatgtcgttatataaattacctataaaaaataaccatgtatttatcttaaatatcaaaacctttataacatccgaaaaagaaagatacgaatagcatttacacaatacccggaatagactttcgtcacttttaattaaagggatgtttttatgcagtggtatttgtccgtattaaaaaattatgttggtttctctggtcgcgcacgtcgtaaagagtactggatgtttactctgattaacgccatcgtcggcgctattatcaatgtcattcaattgattttaggtctggagcttccatatctgtctatgctttatttgctggcaaccttccttcccgtccttgcgcttgctatccgtcgcttacacgataccgaccgtagtggtgcctgggccttgctcttttttgttccgtttattggctggctcgtgcttctggtttttttctgcacagaaggtacttctggcagcaatcgttacggaaacgatccgaagtttggtagtaattaatcttagaattggggcgatatttcgcccctttttattaacaataataaatattattttccgttaaaaagtttgggaatttcccgcagacaccaggatttcgcttcccccatactgtcacgacgccaggccataataatatcgatctcgctggtgctttccgggctgacgacacgcaaccgcccttccgcaatatctttttcgaccataggatacggcatcgtcgccacgccaagccccgccagtaatgcctgacgtttatcttcaatcgtgctcaccgttaagcgcggctgtttgtccagcagctgtacggtcaacaccgggcgctcacgagcggtatccgccaccgcaattccacgatatttcacacgcgtcacttcagataacggttccggctcctgatgaatcgggtgatcaggcgcggcaacgtagacgttcattaacgtatagagcttgcggctgttgatctcgctgctggaacgaaaatgcatatccggcgcgataacaatatccgcccgcccctgctccagccgttcccacgcccccgccagcacttctgtgatgattgccagttgggtattggcttttgccgccagtttgtcgattaacgggaaaaaggcaggtgtcggtaccagcgcttcggtcacaatggtgagatgcgtttcccaaccgcgcgcgagagcttccgcatcagtagtcagtttatctgcggcttccagcaaaacgcgccctcgctccaacaacatcctcccgacattggtgaatttggtacgatggccgctgcggtcaaacagcaccacatccagctcttcttccagtttttgcatggtgtagctaagtgcggaaggcacgcgtcccagctcatccgccgccgccgcaaaactgccccggcgatcgatcgcatccataacccgtagtgcttccagcgttaatgccctttctttggccatttcgttctcattcaggaaatttgaacataccgggcagaatatctggctaacaatgtagcgtccagccccttaccataaaaggaagtaaagagaggtcaagaattatgattactacccgaactgccaggcagtgtggacaagcagactacggatggttgcaggcccggtatactttttcctttggacactacttcgacccgaaattgttaggctatgcctccctgcgtgtgcttaaccaggaagtgctggccccaggtgccgcctttcagccgcgaacctatcccaaagtcgatattttaaatgtgattctggatggagaagcagagtatcgcgatagcgaaggcaatcatgttcaggccagcgccggagaggcgttgctgctctctacccagccgggtgtcagctatagcgaacacaatctcagcaaagacaaaccgttaacgcgaatgcagctttggctggacgcctgcccgcagcgagagaatccgctgattcaaaagctggcgcttaatatgggcaagcagcaattaatcgccagcccagagggtgcgatgggaagcctgcaattacgccagcaagtgtggctgcaccatatcgtgctcgacaaaggcgaaagtgcgaatttccagttgcatgggccacgcgcgtatttgcaaagcattcacgggaaatttcatgcgcttacgcatcatgaagagaaagcggcgctgacctgcggtgatggggcgtttattcgtgacgaggctaacattacgctggttgccgattccccactgcgcgctttgctgatagatttgcctgtctaattgtttttacagggagatgatgatgagtaaaaaattggccaaaaagcgccagccggtgaagcccgtggtggcgaaagaacctgctcgcaccgccaaaaattttggctatgaagagatgttgagcgagctggaagctatcgtcgcggatgctgaaacgcgtttagccgaggatgaagctaccgcgtaaagacaggttgccggatgcggcgaaaacgccttatccggcctacaaaatccaacaacattaacgaattaaacaacccgtaggccggacaagatgcgccagcatcgcatccggcacgatccccaaaacctggcgtttatctggccttgctcgccataatctcgataatctgccgatccgtttgctgcatgctatggcttgctaacgcacacaggttggcaatgctctgctcaacatcatgcgccacaatcccttcattgccggtcacggcggtatcatccagcgccattaacaccgctttccacgcagcgctagcactggtgctaaccttcatcgcgcagctgttgctcgcaccatcgcaaatcatgccgctgacatcgccgatcatactgctgatcgccatgctgatggtttcataacgcccatccaccagccatgccatcccggcggcggcccccattgctgcggtcgttgcggcacacagcgcagacaaacgcggtaactggttatggatgtaaattgcgctcaaatggctaagcatcagcgcacgcgccagccgttcatcatccgctccgaagtgttctgctaccaccaccacaggcattgttgcggtaatcccctggttaccgctgccggagttactcatagccggaagcgtagcgccgcccatacgcgcatcggatgccgcgctggtacgaatcacaatggaactagagagatctttcgccagcaaaccgcgctcgcactgtttttccagcgtcgcgccaatatgcagcccccacttaccgctcaaaccttcctggcttaacgcacaatttagcttcgcggaatcgagaataaagcggatcgccgcaaacgggacttcattgacgaacttcaggatctcagccagcgtcgttctggaaagcaccgtcagcggagactcttgctcgccctctgccacacacgcctgctgggtaaacaccacaccatcgtgcgtctcgatatgcacaatgttggtatgcccgccgacgatggtgacacacgcccacttctcaccgttccagactttggcgcgactgaagaggatttcatcgcaaggttcctggatcttaacggagactttccccgccgccagcagtgctttggcatcggcaattgcctgcgctgttgcgtctttcagcacttccagcccggcgttggcatttccacctaacgcccccagcgccgccgcaatcggcagccccaccattcccgtgccgggaacggtgacgcccagaccgttcttcatcagatttgggctaacccaggcttctacacgttcaaccggaccttccagttctgccgcagcaaccgccgccgccagcgccagactaatcggttcagtacatcccagcgccggttttacttcctcctgaacggcgaggatgtaacgctgccataacggatttaaagtgctatcaaacatattaaaaaccttaaaatttcaggtaaatcaagaaaatgccaggaacggagaaacacacagcaacaaaccagtgacgataatcaggtacagagacatccctttgtatttgtgcaatgctggtactttgtaaaccagccacgccgggatcaggcaccctaccatgccgaaaatcgggctacagatagaggtgaagctcaacaccggtgcgttcagtacgatggcgctccaggccagcaaaatggcgaaaatcatgatgccgcgctgaacgagattttcgttaatcttctcggcaggcatcttgcgacgcaggatgttcattacgatcccttgcgttgcttcgcgaaagcctaaatagacgccaaagaatgcagtcatgacagcaaagatattgagaatgacgctgaccactttcacccacgctgcgccgtcaccgctaataaactgtgcggcaatcgccagcgcggaaatattctgctcataggcttttaccgcttcgtcatgtcccatcgccagcgtgaagctcacggcgtagaaaaagacggtgacaaacaaaatgccaaacgcgatattcattgcccgcaatgctttatgccgcgccacttcaatacttttttcccggctgcgataagagatcaccatcggacttaacgtctggataaacagaatgctcgtcagggtaaacggcagcgtaataatggcgtttttcaccagcagccccagcggcggtaggctaccgacgttatacagatgccacattcccaccatgctcacgcccagcgccgcgaccaccagcagcttggtcagcaccatgccggtgctaattttgaataacaatttctcgccgcgactggagatcgccaccagaatgcaaatcagtaccagaccataaaagggactgtcactcagcaacccttccgtcacgccgaaggtatgcaggtaggaagcactatcgttggtgatggcggtggaatagacgaacatccaaatcaccagcattacgaaatagagcgcacctaacaggatgccccagtttttacctaaataaccgctaatgacgctcgggtaatctttacattctggactttctgccagcgtattaataaacaatcgctgaaacagatacattgccgggtaaccaatcacgctactgagcaaaaatacccacaatcccatcaaaccgacctgcaccgggagaaaaacaatccccgcgccaatcgccatcccgatactcataatcacccagccggtgtcagtactgtcgaatttgatcgcttctcgccactcgctctcactcattccagcacgacccgccggggtcgaagcgtctgcaatgacgcctttattcgatgcaatttccataatttctcgctcaatattttgtagggcttattatttttttccgagccgcatcaaggcgatatgcggtctacgtttttgcaggcgagttattagaataaagaaatgatacgcgcgaggtcagagaaaatcttcacaatcaagactttgaaataacggagatggataagaattttctactaaattaatcgcaggagaatattcattctctatttgcggcagatcacaaaaaaaaggtgcacatttgtgcacccaaggatgaaagctgacagcaatgtcagccgcagaccactttaatggccagtcctccgcgacttgtttcgcggtatttatcgttcatatctttgccggtttcatacatcgtctcgatcactttatcgagactaacacgcggtgcgctggtgcggcgcatcgccatccgcgcggcgtttactgctttcacggcattaatggcattacgttcaatgcacgggatttgtacctgtccggcaaccggatcgcaggtcagcccaaggttatgctccatcgcgatttccgccgcattgcatacctgcgccggactgccgcccagtagttcagttaaccctgccgccgccatactacaggccacgccaatctccccctgacagccgacttccgcgccagagatggaggcgttcattttatacagcgcgccaatagcccccgcggccagaaaatagcgggcaatactccgctcgtttaccggacgacggaacttatcgtaataagccagtactgccggaataatgccgcacgcaccgttagtcggtgccgttaccacgcgcccgccagctgcgttttcttcactaaccgccagcgcgtacatgttgatccagtcgatgacattcatcggatcgttagagatgttatcgctggaaaccagctgacgacgcagcgctacggcacggcgcggcacattgagcggaccaggcagcacgccttcagtgttcatcccacgttcaataccgtcatgcatcacttgccagatacgggcaaaaccggcgtcaatttccgctttgctgcgcagcgctagctcgttgtgcatcatcagaccagatatagacaggccgttgtaatcacacattttcagcagttcacctgcactgtggaaatcgtaaggtacggacgtttcgacatcgtggctcaggccgaagtgttcttcttcgacaataaacccgccgccgacagagtaataggttttacttaatagctcttcctgtcccttccaggcagtgatccgcattccgttctcatggcgaggcaacatttcgggatggaagataatgttctttgctacaggaaaatcaacaatatgcgcaccagatgccactggcagccgcccgctgcgcgttactaactctataaatgcagggatctcatcaatgacaacatcctgcggactgtttcctgccagtcccatgatgatggcgacatccgtggcatggcctttgcccgtcagactcaagctcccgtacagatcgaccacaatatggctcgtcgcggttaataagccgctactttccagccgatcaataaaactttttccggcattcattggccccacggtatggctactggagggaccaatcccaattttgaaaatatcgaatgcactaatcatatccacaccctcggattgccgttcagtgaagtggagcggaacgaccttacgaccgtcccgctcacgaggctttacgcactacgtactgcgatggcttcaatttccagcttcacatctttcggcaaacgcgcgacctgcacacagctccgggtcggataggtcgcctgatgctcatcgaagaactgcttatagacttcgttgatggtggcaaaatcattcagatcggtgataaacacggtcatcttgatgatatcgcccacgctcagcccggcagcaaccacgatcgctttgacgttttcgaggcttaaacgcgcctgatcttgcacatcagccgggatctcaccggtctgtgggcaaaccggtatttgcccggaggtgaagaccatgctgcctaaatcaacgccctgaacataagggccgattgcgcctggggcacgttgcgtttcgataatctttttcatacatcctccggcgtcagagcgcctgggtaaaggtacgactaataacatcctgttgctgttcacgggtcagtgcgttgaagcgcacggcgtagccagagacacggattgtcaggttaggatatttttccgggtgctcgatggcatccagcagcatttcccgattcattacgttgacgttgaggtgttgaccgccttcgacatccgcttcgtggtggaaatacccatccagcaggccgacaaggttggttttacgtactggatcttctttgcccagcgccgcaggaacgatactgaaggtgtagctgatcccatctttggcgtaggtgaacggcagtttcgccacgctcgtcaaactggccacggcacctttgcggtcacgaccatgcatcgggttagcgcccggcgcgaacggtgttccggcgcgacgaccgtccggcgtattaccggttttctggccgtacaccacgttagaagtgatagtcagaatgctctgggtagggacggcgttgcgataggttggcagcgctttaattttcttcataaagcgttcaaccaggtcgcaggcaatgctgtctacgcgctcgtcgttgttgccgtactgcggatattcaccgtcgatttcaaagtccaccgccaggccgttttcgtcacggattggtttcacgcgggcatatttgatggcagacagggagtccgtcgccacgctcaggcccgcgatgccgcatgccatagtgcgatagacatcacgatcgtgcagcgccatcaggctagcttcgtagctgtacttgtcgtgcatgtagtgaatgatattcagcgcgctgatgtactgcaccgccagccagtccatgaagtgatcgaggctgtccatcactttgtcgtaatccagcacgtcgtccatcagcggtgctgttttcggcccgacctgaatcttcagcttctcgtccaccccgccgttaattgcgtagagcagcgttttcgccaggttagcgcgtgcaccaaagaactgcatttgcttaccaatcaccattgggctgacgcagcaggcaatcgcgtaatcgtcgctgttgaagtcagtacgcatcagatcgtcattttcatactgcaaggaagaggtgacgatgctcacctgcgcggcatattttttgaaggcaatcggtaattcttcgctccaaagaatggtcaggttaggttccggtgccggccccatagtgtgcagggtgtgcaaatagcggaaggagtttttggtcaccagcgtacgaccgtccagccccatcccgccgatcacttccgtcgcccagattgggtcgccggagaacaggctatcaaattccggtgtacgcaggaagcgtaccatacggatcttcatgatgaagtgatcgatcagttcctgtgcctgctgctcattgagtacgccagctttaaagtcgcgctcaatgtagatatcgaggaagcttgccgtgcggcccaggctcatcgcgccgccattttggcttttcactgccgccagataagcgaagtagagccactgcaccgcttcctgcgcattctgcgccgggcgagagatatcaaagccatatttcgccgccatttcctgaatctgcaacagcgcatgacgatgctctgccagctcctcacgcagacggatggtggcttccagatcctcgcctttttccagacgagactggagatcggcaaattgcagttcgcgttcacgtaccagataactgatgccatacagcgctacgcggcgatagtcaccgataatgcgcccacggccatagccatctggtaaaccggtcagcacgccagatttacggcagcgcagcatatccggactgtaaacatcaaatacgccctggttatgggttttacgcagatcggtaaacagatattcaaattcactgtccatttctcggccataggcgtggaaactacttttaatcatattaatgccaccgaacgggtgtagcgcacgtttcaacggcgcatccgtttgcaggccaacaattttttccagcggctggttaatatatcccgcatcatgagcggtaattgtggtggcaatattggtatcgaaatcaaccggcgcgtgggttgcattttcgatacggatgccttccattactttttcccacaattccgtggtggcaggcgtcgcttcggcgaggaaagattcatcgccttcatacggtgtatagttatgttgaataaaatcgcggacattaatttcgtttttccagtccgtacctttaaagccaagccatgcgtcggcgtacagcttatcgctggtatcaatatctaccttcatgaaaaataatctctctacaatacttcaactaaattatgcaaattctgcgggcgcgttaactttgcctaaatgaatggcatccaaagcaatcattttttcttcgttagtcggaataacggcacaaatgacacgcgcattttcactggaaacaattcgctcaccacaggagttagagcgattattcatttctgtatcaatctctaagcctaatacagccaaatgttccatgaccagacgacgaattaagctactattctctcctattccgccggtgaatataattccatccaggcgacgtaaactagctgcgtgtccggcaatatgacgggcaattcggtgaacaaaggttttaattgccagttgcgcgcgttcgtgaccttcatgccaggctttttccagaacacgtaaatcgctagaaagaccggaaatacctaataatccgctctctttattcactacgcgttccaggtcacccaggctctggttggtttggctggcgacccaggacatcgcaccaaagtcgacatcgccactgcgggtacccatcatcaagccttccagcggcgtcattcccatactggtatcaacactctgaccgttgcgaaccgcgcagatactcgcgccattgccaagatgcgccacaaccaggccggagtcatcttccgccagattcagcaggctatgtgcgcgctgggaaacatagcggtggctcgtgccgtggaaaccataacggcgtacacctaactcttcataatatttccacggcaggccgtataaataagcttccggagccatcgtctggtggaaactggtatcaaataccgccacctgagttacgcccggaaataattgctgcgcgctttcaataccacttaaattggcgtaattatgcaggggtgccagtggagaaacgcgacggatattatcaatgacttcatcggtaataatggcggactcggtaaaaatactgccgccgtgagcgatgcggtggccaattaaggccacactgtcatttaaattccgtttttccagttcaaatgcaattgccttcaatgcaccttcgtagctgtggtgagccagcggtgctggctctcccccatttacggataagaatgcattttcgctgttaataccgtcggcaataccactcattaatacttcacagtcgctggcatcgagcacggaaaacttaatgctagagctaccacagttaataaccaaaacaaccggaaattcattcatctcttttctcatcctgagttacggattaaaacagtttgtatacgatgttcaggatggtcagcagaccaatcacggtaacaaacacgttatccagacgaccacggtatttcgccagagacggcgctttacggatggcatacatcggcaacaggcacagcagggatgcgataatcggtgcgcccatggcttcaatcaggtcaaggatgttcgggttggcgtaggcaacaacccaggtggagcccatgatgaagatcatgctgatagtgttcagtttacccaggctcactttagttttgtcgcctttataaccaaacttcaggaccaggccattcagaccttccagcgttcccagatagtgaccgaagaaagatttgaagatagccacgagtgcgatgatggaagccgcatattccagtgtaatcgcgaacgttgttttggtaccggtcatggacgcaaagtggttagccagataagaaagcactggaatattctgcgctttggcttccgccatgttggccggagacagagtaaacaggcagctaaaggcaaagaacatcaccactgcaaccatcagcatgctggcacgagaaatgatttgggaacatttacgttcggtgaagtcgcgaccgaagtctttctcatactcttcacgcttagaaaccacgaaggaagagacgattgggctgaagttaaaggagaaaaccatgatggaaatccccagccagacagtgatcaggataccgtcatgaccggttaagctcaggctaccgaggtcaacctggtcgataactgcagagttccagtaagggatcaggctcaaagaaatcagcaccaggctggcgataaacggccataccaggtagctcatcactttaaccatcagatccttaccaaaccagatgacgaaagccatcagcagcaacaggaacagcgccacaaagccgcgattcagcggtgcaaagccgagctggttttcccagaacgtcataaaggtattggtaatagtaacgccataaatccacagcagtgggcaaatcgcgaagaagtacaggaacgtgataaccacgccgccagttttaccaaaatgctcttccaccgtttccgtaatgttgccggaagggttagagccagaaagacacagacgcgccagcgcccggtggcaataaaacgcgatggggtatgccaataccaacatcagaagaatcgggatcagtccgccaaaacctgcgcggatagggaagaacagcaccccggcgccgattgccgtaccaaacaagcctaacgtccatgtggtatcacttttacgccaggagctttgttttgtctggctggatacaatgctatcactagtactcatatcctatcctcaacgaattaattaagcgtcaacgaaaccggtgatttgagagacgcgagaaagatcgatattgccgccggaaataatactgacggtttttctgttttgaatatattggtctaatttaccgcttaataatgcagcacatgccagagcgcctgcgccttcggtgacgactttattgcgctgaattaaggcaatcatactgtttctgatttcgtcttcgctgaccagcacgatgtcatcgactaattcacgaacgatttcgtaagttaaattacccgggcgggagacatcacaaccatccgccagggtgccggtagttcggtgcgtggttatttctccggagtggaaagaagccgccatgccgtgaacgttttcagactgtacgccaataacacgaatggtcgggttaatagatttaattgccaccgcaataccagcaattaaaccgccaccaccaattggcacaatcacgttatcgacatcatagagatcttccataatttccagaccaatcgttccctggccagcaatcactttcggatcatcgtaaggtgggataaaaatacggccttccatttcgacaatttcgctcactttagcgatagtgtcgttgaagttatcaccatgcagaacgacttctgcggagtagtcgcacgttgccgctactttggattttggcgcaccttttggcatcaccactttaccgtcgatacccagcatcgcgcaggagagggaaaccccttgcgcatggttgcccgcagaacaggccaccacgcctttgcgtttttccgcatcggtcagactacttaatttattaaatgcgccacgaattttaaaactacccgtacgctgcatattttcaaacttcaggaatatttcacctttgcaacgttcactaaaatagttggagcgaggcatgcctgttttataaattcgcccagccagtcgttgtttcgcttcaataatgtcatcaatagcaaccggcagatcgtatgtaatatgcattataaaacctcttcgcctgaattaaatatgtaggtaaccgtaaccgacacctgcaagacagacaggtggattatttatgtttaaataaaaacaaataattaaccaacttctattaattgccttcgtctacacccattataagaactatactctttggctaattccaccaaaacgcttgctgcttttttaatacgataatttttgctccataccgcggcatattgtgccacaggtaatgtttcttcaaccggaatagtaataaattgattagaaccaaaaggactcgtcatatcacaaggaattacagttaagaaatcagcattgagaacaagattataaattgtcacgacactgtcggttttaacgatgttttcaatactgatgccatttctttgtaacgtagtaagcagttcgctgtagtaccccatattagtttgtggcaacacccactgttcgttcttcaagctctccagcgtggtggtgccggtgcatgttcgggacttactggctaccagcacaaactcggactcgaacagcggctcaacatgtaaatcctgaagcttcatttctgcacttaacgtaccaatcgcaaaatccagtcgaccgtcgcggattgccggtaagaagctagacagttgcgcttcatacatagaaacctgcgctttcgggaacacctctttgaacttgttgatcatcccactcataaaagtaaaaccaatcaaactaggaaaaccaaaactgacttccaccaccgcctcagaagacataccgcttatctcattaaccatatttttcatttcacgggtaatggattcggaacgggagagtaacaattgaccggcaggtgttaatgttacaccggtatttttccgcaccactaattccacaccaaaataatcttcaatatcgttaatgattttactgacggccggttgagttaaccctaattcttttgcagcgctgccgatagaaccacttctaatgacttcctgaaagactaccaggtgctgcgttttcggaagaagaatagtgctcataacgacctacgttaattacctcattgacggcatgaagtgtatcaaaatgaaatgaacaggatatgtgcgaccactcacaaattaactttcaatactttccagagtatcgttattacaattaaatacctttaaatatcaacaagttaaagtataaaaatcagcataaaccctgatttttgtcaaaaaaaatgacggggataaccatattttatggcgataacatcattcgttatgtggttaatacaaaaaaggggctgagaccatatttcaagcaattaccggataattaccaggcaaaatttgagttaaatttaatgagcaagttcagtaattttattataaataaaccatttagtgtgataaataatgcggcatgtcacatttttagtcgctatttgttggagaacaaacatttattttatcaatattttaaaattagcaatacatgtattgatcatctcgaacaattgattaacgtcaactttttctcttctgacaggacgagtttttgtgaatgcaatcgttttccataaattcttctcccctcataggcgacgaatagcattttgtgttgaggatcacaaaacgaataattgctgatcgccgcgataaggtcagacaaagacaacaagggaaattttcacagagcttttgatcggcgtaggccacagaatgttgcttcgtttactgtaacgccgggtaaatgagcgttttttgatagtgcgaaagaaccctgcgaggaaaataagcatctattattgtttgtcatgatgacaaggcaggcatcaatgaaaggcttcccaattgcgcatatttttcaccctagtatcccgccaatgcacgcagtggttaacaatcacaatagaaatattgattattggacggtaaaaagaaagtttgcagaaattgtctccaccaatgacgttaataaaatttacagtataagtaatgaactgcggagagtattatctgcaataactgcattgaatttctatcatggcgatgttccttctgtcatgatccgaatccaaccggaaaatatgagtccattcattatagatatttctacaggagaacatgatgattatatcatacaaacattagatgtaggcacttttgcaccttttggtgaacaatgtacttgcagtgccgtcaataaaaaagagctggaatgtattaaggagacgatttctaagtattgtgcaaaattcacccgaaaagaagccatcttaaccccccttgtgcactttaataaaaccagcattactagtgattgttggcaaattctcttttttagtcccgatcattttaataatgatttttattgattatttataaaggataaaataatgttccctgttagtagtattggtaatgatattagtagtgatttagtccgtcgaaaaatgaatgaccttcctgaaagcccaacaggaaataacctcgaagcactagcaccaggtatagaaaaactaaaacagacctctattgaaatggtcactttacttaacacgttacaacctggtggaaaatgcattatcactggtgattttcaaaaagaattagcgtacttacaaaatgtaattctttataatgtcagctctcttcgtctggattttttaggttataacgcccaaattattcaacgaagcgacaatacttgtgaacttaccattaatgaaccgttaaaaaaccaggaaatatccacaggtaatatcaatattaattgcccattaaaagatatttacaatgaaatcaggaggttaaacgtaatttttagttgtgggactggagatatcgttgatctatcctctctggacttacgtaatgtcgatttagattattatgatttcacagataaacatatggctaatactattttaaatccttttaaattgaatagtacaaattttactaatgccaacatgtttcaggttaattttgttagtagtacacaaaacgccacaatctcctgggattatttactaaaaataacgcctgttttaataagcattagcgatatgtattctgaagaaaaaatcaagtttgtcgaaagttgtttaaatgagcctggagacattaccgaagaacaattaaaaattatgagatttgcaattataaaatctataccaagggcaactcttacagataaattagaaaatgaattaacaaaagaaatatataaaagcagtagcaaaatcatcaattgcttgaacagaattaaattaacagagatgaaagaattcagtagtgaaaaaatatatgattacatcgatataatcattgaagattatgaaaataccaaagaaaatgcttatctggtcgtcccccaaattaattatactatggatttaaacatagaagactctagcagtgaagagttacttagtgataataccctcgagaaagacgaaaattctccggacaatggctttgaggtcggggaatataacacatatgaagcatataacagtgagaagcaatattttaccagagaggactatacgtatgattacgaccttttaaatgcaatataaacttaataacttcttacaaagtctattattaataccgtagatatttattcatcttaccctgtgcaccaaaagcaaaaactcactgacgcgggtttgaaactgatggcaaccgcaaaaatgcctgatgcgctacgcttatcaggcctacgccatctctgcaatatattgaatttgcgtgcttttgtaggcaggataaggcgttcacgccgcatccggcatgaataaagcgcactcaacaatctgaaacccgccggaacggtttattacgtacatcaggtaaaactgaccgataagccgctttcttttgggtatagtgtcgtggacagtcattcatctttctgcccctccaaaagtaaaaacccgccgaagcgggtttttacgtaaaacaggtgaaactgaccgataagccgctttcttttgggtatagtgtcgtggacagtcattcatctttctgcccctccaaaagcaaaaacccgccgaagcgggtttttacgtaaaccaggtgaaactgaccgataagccgctttcttttgggtatagcgtcgtggacagtcattcatctttctgcccctccaaaagcaaaaacccgccgaagcgggtttttacgtaaatcaggtgaaactgaccgataagccgggttctgtcgtggacagtcattcatctaggccagcaatcgctcactggctcaagcagcctacccgggttcagtacgggccgtaccttatgaacccctatttggccttgctccgggtggagtttaccgtgccacggactgttaccagccgcgcggtgcgctcttaccgcaccctttcacccttacctgatcccgcttgcgcgggccatcggcggtttgctctctgttgcactggtcgtgggtttcccccccaggcgttacctggcaccctgccctatggagcccggactttcctcccctccgcccgtctcccccgaagaggacgacgacgaagcggcgactgtctggtcagcttcggcgcgcagtatagagggtttgcgcgcccttgtcaccccgcgttgcgcattccaatcgccagtgtcgcggcgatattacgactagcacggcagatattgtcataagccccgcggaatgcttcgtccaacgtacctatgctggtcaatacgctgaagaccgcatcaatgccatgctgatgtacaacgccaacatcatcggtcaggctacccgcaatgccaatcaccggtttatggtacttcttcgccacgtttgcgacaccaatcggtaccttcccgtgaatactctggctgtcaatacgcccttcaccggtgatcaccagcgtacaatcgtgaatatgttcctccagattcagcgccgtagtgacgatttcaataccacttttcagttccgcaccaagaaacgccattagcgccgcgcccataccacccgcagctcctgcaccggggacatctttcacatcaacatgcagcgcttttttaatgacctcggcatagtgagagaggttattgtccagctcaacaatcatcgcttcactggctcccttttgtgggccaaagatgcggcttgcgccgttatcgcccaccagcggattggtgacatcacaagcgacgcgaatgacgcaatcttttaagcgcggatcgaggccggaaatatcaatatcattcagagtattaagactaccgccgccaaaaccaatttcattgccgttggcgtcgcataatttcgcccccagcgcctgtaccatgcctgcgccgccatcatttgtagcgctgccgccaatgccgataataatgtttgtcgcaccgctctccagcgcctgcaggattaactcgcctgtgccgcgactagtggtcacgagtggatcgcgtttttccgcaggtaccagctccagcccactggccgccgccatttcaataaacgcggttttgccatcgccggagatcccccaactggcattcactttctcgcccagcggccctgtaacccaggcgtgacgttcagccccctgggtggctgcaatcatcgcttccaccgttccttcgccaccgtcggcaaccggaacagaaacgtactgtgcatcaggaaaaatttcccgaaatcctttttctatcgcctgcgcaacctcgctggcagataaactttctttataagagtctggggcgattacgattttcatacctatgcctgttaccacatgacgccggagggcgtttctcttattcggcctggattccaggcccggattgcaatacgccatccgggcacgacgtcattaacgagtaacttcgactttcgccagtttttcgtagtagcacgccagggcgctatgatccgccgttcctaaaccatctgctcgcagtgcctgcatcatctccataaccgcagctgtgagcggcagttgtgcgccgacgccgtgagaagtatccagcgcattcgccagatccttaatatgcagatcaatacggaagcccggcttgaagttgcggtccatcaccatcggcgctttggcatccagcacggtactgcccgccagtccaccgcgaattgcctgataaaccaggtccgggttaacgcccgctttagttgccagcgttaacgcttcactcatcgcggcaatattcagcgccacaatgacctgatttgccagtttggtgacgttacctgcaccgatttccccggtatgcaccacggaacccgccatcgctttcatcaaatcatagtatttgtcgaaaatagccttgtcgccgcccaccatcacactcagcgtaccgtcgatggctttcggttcaccgccgctcaccggagcatccagcatatcaatgcctttcgctttcagcgcttcgctgatttcacggcttgccagcggtgcgatagaactcatatcgatcaataccgtacctggcttcgcgccttcaataatgccattctcacccagcgccacctctttcacatgaggggagtttggcagcatggttatgatgacgtcgcactgttcagcgatcgctttagccgtagacgctgtttctgcacctgcagcaatcacgtcagcaatagcttctgggttacggtcagcaaccaccaggctgtaacctgctttcagaaggtttttactcattggtttacccataatccccaggccaataaaaccaactttcatagtcatatcaatcatctctcttgttgcggtggtggttattttttaaaggtatcagccagtttctgagtggcagagcggaagacgccgagatcgctgccgacagccacaaacgtcgcgccccattccagataacgacgcgcatcggcttcgaccggcgcgaggataccgctgggtttgccgtgcgcgctggcacggttaaaaatgtgctgaattgctttttgtacatccgggtgacttgcattgccgagatggcctaatgccgcggccagatcgctggggccgacgaagatgccgtctacgccttcggtagcggcaatggcatcgacgttatctacgccctgctgactttctatctggaccagaatagtgatgttcttgttgctctgagcgaaataatccgccacggtgccaaacatattggcgcggtgagaaacggagacgccgcgaatgccttccggtgggtaacgggtacttgccaccgccagctctgcttcctcttttgtttctacaaaaggaatcaggaagttatagaaaccgatatccagaagacgcttaataattaccggctcgttggtcggcactcgcactactggcgcgctggcgctgcctttcaaggccattaactgcggaataaacgtggagatatcgtttggcgcatgttcgccatccagcaccagccagtcaaacccagccaaaccaagaacttcagtgctaatcgggttagagagtgcactccagcaaccaatttgtacctgtttcgcagccagtgcggctttgaatttattcgggaaaacatcgttattcatcgcttatacctttgcttatttctgcaattccatacgtttaatgtcgccaactacgaagaggtagcagaccatcgccatcagcgcactacatcccacgaaaaccagtgctgcattgaaggagtgcagttcacttaccaggtagccaatcaccagtggagtgacaatggaggcaacattgccaaagacgttaaagacgccgccgcagaggccaacaatctctttcggcgcggtgtcagaaatcaccggccagcccagcgcaccaaatcctttgccaaagaaagccagcgccatcagcatgaccaccagcgtggtgttgttggtgtagttacataagatgatggtggaagccagcaacattcccagcacaatcggtagcttacgtgccagggtcagggataaaccgcgtttgatcagataatcgctgaagacacctcccagcacgccgcccgcaaaaccacacagtgctggaatgctggcgaccagacccactttcagaatgctcatgcctttttcctgcaccagataaatcgggaaccaggtgaggaagaaccaggtgatggtgttgataaaatattgtccgaaaaatacgcccagcatcatgcggttagagagcaattgcttgatgtaatgcagtttgggtccgcttgctgccgcactgcccggctttttgtggtccatatcgaccaccgcgccattttcagagataaacttcagctcttccgcagacatacgtgggtgatctgtcgggttatgaatcaacttgatccacagcgccgtcagcacaaaaccaatcacccccataacggtaaagacgtgctcccagccccaggcgaaagtcagccagccaagcagcgggctaaagagcgccaggctgaaatattgcgcgctgttaaagatggcggaggcagtaccacgttctttcgtcgggaaccaggcggcgacaattcgggcgttcgccgggaaacttggcgcttcgctgaagccgagcataaagcgcataaagaacatggagatccctgcccaggccagcgggaacatatcaacaaagccttgcaggaaggtgaataggctccagaaaaagaggctgtaggtgtaaacttttttgctgccaaacttatcaagcagccagccgccggggatttgcatcagcaagtaggcccagccaaaagcggagaagatgtaacccatgctaaccgcacttaactgcaactcttttgccacttcggtaccagcaatagacagcgttgcacgatcggcgtagttaacggcggtaacaataaaaataatcagtaatattaaatagcgggtatgcacgcctttctttttttcgtcaacggtgtccagaatcattttatttacctcgggtacttatgctgatttttattattatggggaaggtgttatttatgagtttcatttatgccgtaacgacaatgaactcgggaattagtataagcagcgcgagaataataatcattgtgcaaatgctaatttaattaatactatttaaatattattttgagcatatgcacataaggttgcgcgctaaagcacagatttgcgctttaccttaccgggcggcactgcaatccctgaaatgattgacattgatcacatttctgcgtttaaactcctgacattcttatttcacccaatgaagtcatttatttttaaatgagaccaggtcctcattttaataacccctggctggagaatattgcacaatggccaacatcgaaatcagacaagaaacgccaactgcgttttatataaaagttcacgacacagataatgtggcaattattgttaatgataatggcctgaaagcaggaacgcgttttccggatgggctggaattaattgaacatattccccaggggcataaagtcgcattgctggacattccggctaatggtgaaattattcgttatggcgaagtgattggttacgccgtgcgtgcaatcccacgcggaagctggatcgacgaaagcatggttgtactaccggaagcgccgccgttacacacgctgccactggcaaccaaagtcccggaacccttaccgccgctggaaggatacacctttgagggctatcgcaatgccgatggcagcgtgggcaccaaaaacctgctcggtatcaccaccagcgtccactgtgtggcaggcgtggtggactatgtagtaaaaatcattgaacgcgatctgctaccgaaatacccgaacgtcgatggcgtggtggggctgaatcatttgtacggttgtggcgtggcgattaacgcaccggcggcagttgtacctatccgtaccattcacaatattagcctgaatcctaactttggcggcgaagtaatggtgattggcctgggttgtgaaaagttgcagcctgagcgcctgctgactggaacggatgatgtgcaagctattccagtagaaagcgccagcattgtcagtttgcaggatgaaaagcatgtcggttttcagtccatggtcgaggatattttgcagatcgccgaacgccatctacaaaaactgaatcaacggcagcgagaaacctgcccggctagtgaactggtcgttggtatgcagtgcggtggcagcgatgcgttttctggtgtaacggcaaacccggcggttggctatgcgtctgatctactggtgcgctgcggcgcaacggtgatgtttagtgaagtaacggaagtgcgtgacgcgatccatctgctgacaccacgcgcagtgaacgaagaggtcggcaaacggctgctggaggagatggagtggtacgataactatctcaatatgggaaaaaccgaccgcagcgccaaccctagcccgggcaacaagaaaggcggtctggcaaacgtggtagagaaggcactcggctccattgctaaaagcggtaaaagcgcaattgttgaagtgctgagccccggtcaacgcccgactaaacgcggattaatttacgccgcgacgccagccagcgattttgtctgtggcacgcaacaggtggctagcggtatcacagtgcaagtgtttacgaccggtcgtggtacgccgtacggcctgatggcggtacccgtcattaaaatggcaacccgcaccgagctggcgaaccgctggtttgatttaatggatattaatgcgggcaccatcgctaccggcgaagaaactattgaagaggtgggctggaagttgttccactttattctcgacgtcgccagcgggaagaagaaaaccttcagcgatcaatgggggctgcataaccagctggcggtgtttaacccggcaccggtgacctgatttcttttggaacgtccctcgcaaaacatggccttagtgccatgtttttattgtttaaagcccccacgtccattaataatgcatttgcattaccttagttcaagcttataatttgagcagaaaacaggctgtaaaaggacagtgaatcatgcccgctaatgctcgctctcacgctgtactgaccactgaaagtaaggtcacgatacgcggacaaacaactatccccgcgccagtgcgtgaggccttaaaactgaagccaggccaggacagcattcattacgaaattctgcctggtgggcaagtatttatgtgccgactgggagatgaacaggaggatcatactatgaatgcatttttgcgttttctggatgcagatatccagaacaacccgcaaaaaactcgtccattcaacattcaacaaggaaagaaacttgtcgctggcatggacgtcaacattgatgatgagattggcgacgacgaataatggattttccacaaagggttaatggttgggcgctatatgctcatccctgttttcaggaaacctacgacgctttagttgccgaagtcgagacattaaagggaaaagatcctgaaaattatcagagaaaagccgccacaaagttattggcggtagtccataaagtgattgaggagcatatcacggtcaatccaagtagtccggcattccgtcatggcaagagcttaggctctgggaaaaataaagactggagtcgggtaaaatttggtgctggtcgttatcgtctcttctttcgttatagtgaaaaagagaaagtcatcattctgggatggatgaacgatgaaaacactctgcgcacctacggtaaaaaaacagatgcctataccgtattcagcaaaatgttaaaaagaggacatcctcctgccgactgggaaaccctcacccgagaaacagaagaaacccattgatggtgttcacaatgcccgccgaacgcattcgtgttgaccagcgggcatcctttctcactccccgaccagaatcacttcaaccccagcctttcgcagtccttccaggctatccgcaggaatgccttcatcaacaatgatcatgtcgatacgttgagtatcaatgatcttatgtaaactggaacgattgaacttactggaatcggtgaccacgatgatccgttccgcaacttcgcacatccgacggtttaaacgagcttcatcttcattatgtgtgctgacgccgcgctccagatcgatcgcatctacaccaagaaacagcatatcgaagtggtaattttgcaggctttgctcagcctgatcgccgtaaaaagattggctctgacggcgcaaatgcccgccggtcatcagcagctcaacgccttccgcttccagcaacgcattagccacgttcataccgttggtcatcgcaattacgtcagtgtgcttgcgcatcagacgagcaatctcaaaagtggtggtcccggaatcgaggataacccgatgacctggctgaatcaactcaacggcagctttcgcaacgctgcgtttcatcgcggtgttcagtgcgcttttatcttccacacttggctcgacactcggcgtcgtgctatcgcagatcaacgcgccaccataggcacgcacagcgatcccctgcttttccagaaacgccagatcgttgcggatcgtcacagtagatacgccatacaatgcgctcagatcgttaacctgcacactcccttgctgtcgcagacgctgaatgatctgttctcgtcgctcgctggtgccagtcactcgcttctcaccactagcgtcggtattactcatagtaagtcctttcgtaaaactttcgtttcatttcgttttgcctattaacgcctttctattaagcaaatgcaagcccaccttgcccattgacgcaagctactctcgtttcagtgactttcattatgtttcttttgtgaatcagatcagaaaaccattatctttcgttttatttttatctcaccatgacgcagtatcaactgaaacaaaacgaaagattaatatcgcagtaatctgaactggagaggaaagtgaaacatctgacagaaatggtgagacagcacaaagcgggcaaaacaaatggaatttatgccgtttgttccgcacatccgctggtgctggaagctgcaatccgctacgccagtgcaaaccaaacgccgttactgattgaagcaacctccaatcaggtagaccagttcggcggttataccggaatgacgcccgccgattttcgcggctttgtttgtcagctcgccgacagcttgaatttcccgcaggatgcgttgattctgggtggtgaccatctggggccaaaccgctggcaaaacctgccggccgctcaggcaatggccaatgccgatgatttgattaaaagctacgttgcggcaggattcaaaaaaatccaccttgattgcagcatgtcctgtcaggacgatccgattcccttaactgatgacatcgtggctgaacgcgccgcccgtctggcgaaagtggcggaagaaacctgtcttgaacactttggcgaagccgatctggagtatgtcattggtaccgaagtgccggtacctggcggcgcgcatgaaaccttaagcgagctggcggtcaccacgccggatgccgcccgcgccacgctggaagcccatcgtcacgcctttgaaaagcaaggtttgaatgccatctggccacgcatcattgccctggtggttcaacccggcgtcgaattcgatcacaccaacgttattgattatcagcccgccaaagcgagcgccttaagccagatggtcgaaaactacgaaacgctgattttcgaagcgcactctaccgattatcaaacgccgcaaagcctgcgccagctggtgattgaccactttgccattctgaaagttggcccagcgctgaccttcgccctgcgtgaagctctgttctctctggcggcgattgaagaagaactggtgccagcgaaagcctgttctggtctgcgtcaggtgctggaagacgtgatgctcgaccgcccggaatactggcaaagccactaccacggtgacggcaacgcgcgtcgtctggcgcgtggttatagctacagcgatcgcgtgcgctattactggccggacagccagattgatgacgctttcgctcatctggtacgtaatctggcggatagtccaattccgctgccgctgatcagccagtatctgccgctgcagtacgtgaaagttcgctccggcgagctgcagccaacgccacgggaactcattatcaaccatattcaggacatcctggcgcagtaccacacagcctgtgaaggccaataagcaaaacaaagaggaacacgctatgccaaatattgttttaagccggattgatgaacgcttgattcacggtcaggtcggcgttcaatgggtcggatttgcgggggcaaatctggtgctggtagccaacgatgaggttgccgaagatccggtacaacaaaacctgatggaaatggtactggcagaagggatcgccgtacgtttctggacgctgcaaaaagttatcgacaacattcatcgcgccgccgatcgacagaaaatcctgctggtttgtaaaacacccgccgatttcctgacgctggtgaaaggtggcgttccggtgaatcgcattaacgttggcaatatgcactacgccaatggcaaacaacaaatcgccaaaacggtttctgtggatgcgggcgatatcgcagcatttaacgacctgaaaaccgctggggtggaatgcttcgttcagggcgtcccgacagagcctgctgtggacctctttaaattactttgagggattcatcatggaaatcagcctgttgcaggcatttgcgttgggcattatcgcctttatcgctggcctggatatgtttaacggcctaacccatatgcaccgcccggtggtcctcggcccgttggtcgggctggtacttggcgatctgcataccggaattttaaccggcggtacgctggaactggtgtggatggggctggccccgctggcgggcgcacagccgcctaacgtgattatcggtactatcgtcggcacggcgtttgccattactactggcgtgaaacccgatgtcgcagtaggtgtcgccgtacctttcgctgtcgcagtacagatggggattaccttcctgttcagcgtgatgtccggcgtgatgtctcgctgcgacctggcaacaaacccgcgccgcatttgatgctggtgccgacggcctggtgcattgctataacgggatgacaggtttacatcaccgcgaaccgggaatggttggcgcgggattaacggacaagcgcgcctggctggaactgatagccgatggtcatcatgtgcatccggcggcaatgagcctgtgttgttgctgtgcgaaagagagaatcgtactgatcaccgacgcgatgcaggcagctgggatgccggatggtcgctatacgttatgtggtgaagaagtgcagatgcacggtggcgttgtccgtaccgcgtctggtgggctggcgggcagtacgctgtctgttgatgcggcagtgcgcaatatggtcgagttgacgggcgtaacgcctgcggaagccatccatatggcgagcctgcatccggcgcgaatgctgggtgttgatggtgttctgggaagccttaaaccgggcaaacgcgccagcgtcgttgcgctggatagcgggctacatgtgcaacaaatctggattcagggtcaattagctagcttttgatagtttgctcctttattgggccttcacttcccccgtaaggcctttctttttctttcgttttgatctgtgcagcggtgtcggatgcgacgctaacgcgtcttatccgacctacagttggtgaccgcaaggccggataaagcgtttgcgccgcatccagcaatcccttttgcttcctttatcttttctttcaacgatcacaaatttcgttttatttcttttttctccattgaactttcagtttcttttctatagattttaatcaacgaaagacatcaccaagtgaaatgaaacgaaaggcaagtgaaagcgacaacgcccgacgtcaagttcatcagactaaggattgagttatgccagaaaattacacccctgctgccgccgcaaccggtacatggactgaagaagagatccgccatcagcctcgcgcatggatccgtagtctcaccaacatcgacgcgctacgttccgcgctcaataacttccttgaaccgttactgcgcaaagagaatctgcggatcatcctgaccggagccggaacgagcgcatttatcggtgacatcatcgcgccgtggctcgccagccataccggtaaaaacttcagcgccgtaccgaccaccgatctggtcaccaatccgatggactacctgaacccagctcatccgctgctgttgatctccttcggtcgatccggcaacagcccggaaagcgtcgcagccgtggaactggcaaatcaatttgtaccggaatgctatcacctgccgatcacctgcaacgaagcgggcgctctttaccaaaacgcgatcaacagcgataacgcgtttgccctgctgatgcccgcagaaacgcacgatcgcggctttgcgatgaccagcagcattaccaccatgatggccagctgcctcgcggttttcgcacctgagacgatcaacagccaaaccttccgcgacgtggcggatcgttgccaggcgatcctgaccagtctgggcgatttcagcgaaggtgtgtttggttacgcaccgtggaaacggatcgtttatctcggtagcggtggcttacagggcgcagcacgcgagagcgcgctgaaagtgctggaactgacggcgggtaaactggcggccttttatgattctccaaccggattccgtcatggaccaaaaagcctggtcgatgacgaaacgctggtggtggtatttgtctccagccacccttacacccgtcagtatgatcttgatctgctggctgaacttcgccgtgacaaccaggcaatgcgtgtaatcgccatcgccgcggaaagcagcgacatcgtcgctgccggtccacatatcatcctgccaccgagtcgtcactttatcgacgttgagcaggcattttgcttcctgatgtacgcccagacgtttgcactgatgcagagcctgcacatgggcaatacgccggataccccaagtgccagtggcaccgttaaccgcgtggtgcaaggcgtaatcattcatccgtggcaggcataagaggatcgcattatgagcattatctccactaaatatctgttacaggacgcccaggccaatggctacgcggtgcctgcttttaacattcataacgccgagacgatccaagcgatcctcgaagtgtgcagtgaaatgcgaagcccggtgatcctcgccggaacgccggggacctttaaacacatcgcgctggaagagatctacgccctgtgtagcgcctattccacaacctacaacatgccactggcgctgcatctcgaccaccacgaaagcctggatgatattcgccgtaaagtccacgcaggtgtgcgcagtgcgatgatcgacggcagccacttcccgtttgccgagaacgtgaagctggtgaaaagcgttgttgacttctgccacagtcaagattgcagcgtggaagcagaactgggccgcctgggcggtgttgaagatgacatgagcgttgacgccgaaagtgcattcctgaccgatccacaagaagctaaacgctttgtcgaactgactggcgtcgacagcctggcggtagcgattggtacggcgcacggcttatacagcaaaacgccgaagattgatttccagcggctggcggaaattcgtgaagtggtggatgttcctctggtgctgcatggtgccagcgatgttccggatgaatttgtccgtcgcactattgaacttggcgtcacaaaagtgaacgttgccacagaattaaaaatagccttcgctggcgcggttaaagcctggtttgcggaaaatccgcagggtaacgatcctcgttattatatgcgcgtcggaatggatgcgatgaaagaagttgtcagaaataaaattaatgtctgtggtagtgcgaatcgaattagtgcataatcattagttttttatgatttatcccaatgtacttcccgattaatatcggggagtgccttaatggaaaaggagataactaaaccttaataaatacatcactacaatatcgcaacaataatatatttaaaaaaattatattattcaactttatggtgaggattacacaatgaccagtccaaatattctcttaacccgtattgataaccgtctggttcacggtcaggttggcgtgacctggacatccaccatcggtgcaaatctgctggtagtcgtggatgatgttgtcgctaacgatgatattcaacagaaattaatgggtattaccgcggaaacctacggctttggcattcgtttctttactatcgaaaaaaccattaacgtcatcggcaaagctgcaccacatcagaagatcttcctgatttgccgtacgccacaaacggtacgtaaattggtagaaggtggtattgacctgaaagatgtcaacgtcggcaatatgcatttcagcgaagggaaaaagcaaatcagcagtaaagtttatgtcgatgaccaggatctcacggacttacgttttattaaacaacgtggcgtgaatgttttcattcaggacgtccctggcgatcaaaaagaacaaatccctgactaaatctaaaatcgccttaatattggtttgaggtaataaaaatgcatgaaataaccctacttcagggattatccctggcggcgttagtttttgttctggggattgatttttggctggaagccttatttttattccgcccgataatcgtttgtaccctaactggcgctattctcggtgatattcagactggcttaattaccggtggtctgacagagttggctttcgccggattaacccctgcaggtggtgttcagccgcccaacccgattatggcgggtctgatgaccaccgtcattgcatggtctacgggcgttgatgccaaaacagcaattggtcttggcctgccgtttagtttgttaatgcagtacgtcattctgttcttctattccgctttcagtttatttatgaccaaagccgataaatgcgcgaaagaggcggatacggcagcgttttcccggcttaactggacaacgatgctcatcgtcgctagtgcgtatgcggtgattgctttcctctgtacttacctggcacagggggcgatgcaggcgctggtgaaagcgatgcccgcctggctgacccacggctttgaagtggctggcggtattctgcctgccgttggttttggcttgctgctgcgcgtaatgttcaaagcgcaatatatcccttacctgatcgccggtttcctgtttgtttgctacatccaggtcagcaacctgttgccggttgccgtactgggcgcaggctttgcggtgtatgagtttttcaatgcgaaatcccggcagcaagcgcaaccgcagcccgttgccagtaaaaatgaagaagaggactacagcaatgggatctgaaatcagtaaaaaagatatcacccgtctgggctttcgtagcagcctgctgcaagcgagctttaactacgaaaggatgcaggcgggcggttttacctgggcgatgttgccgatcctgaaaaagatttataaggacgacaaaccgggcttaagcgcggcgatgaaagataacctcgaatttattaatacccacccgaatctggtcggattcctgatggggttattaattagcatggaagaaaaaggagaaaaccgcgacaccattaaaggcctcaaagtggcactgtttggcccaatcgccgggattggcgatgcgattttctggtttactttgttgccgattatggcgggaatttgcagtagttttgccagccagggaaacctgctggggccgattctatttttcgccgtttacctgcttatctttttcctgcgcgtcggctggacccacgtcggttatagtgtcggcgtgaaggcgatcgataaagtgcgagagaacagccagatgattgcccgtagcgcaaccatcctcgggatcacggtaatcggcgggctgatcgctagctatgtgcatattaacgtggtgacaagctttgccatcgacaatacccacagcgttgcgctgcagcaggatttcttcgataaagtcttcccgaacattttaccgatggcctacaccctgctgatgtattacttcctgcgggtgaaaaaagcgcatccggtgctgttaatcggcgtgacttttgtgctctctattgtttgttccgcattcggcattttgtaaatggaacgaggcactgcgtctggtggtgcctctttacttaaggaatttcatcctgtgcaaacccttcagcaagttgaaaactatacggcgttaagtgaacgtgccagcgaatatttattggccgtgatccgtagcaaaccgaatgccgtgatttgcctggcgaccggagccacgccattactgacgtatcattatctggtagaaaaaatccaccagcagcaggttgatgtcagccagctcaccttcgtgaagctcgacgaatgggtggatctgccattaacgatgccaggcacctgcgaaactttcctgcaacagcatatcgtgcagccgctggggctacgtgaagaccagctcatcagctttcgctccgaagagataaatgagacagagtgcgaacgggtaacgaacctgattgcgcgcaaaggcggtctggatttatgcgttctcggattggggaaaaacggtcatcttgggctgaacgaaccgggagaaagcctgcaaccggcctgccatatcagtcaacttgatgccagaacacagcaacatgagatgttaaaaaccgcgggtcgccccgtgactcgtgggatcaccttaggcctgaaggatattctcaatgcccgcgaagttttgttactggtgactggcgaaggaaagcaggatgcgacagatcgttttctcacggctaaagtctctaccgctatcccggctagttttttatggctgcacagtaactttatttgtttaattaacacctaaccagatgaaaaatttgctcaaaatgtttaaattaacttatgtaacagtcacgcattatattaaataacatttgactgggttgaacataacgccgatagcaaaaggagttatgttcaacaatttaattttagatatacatataacttgttctattaataaatcacctcgtattctgactcgccccctggcgcagcaaagtcaggcatttatactcttttgaatacatagaaaattgatatcaatataatgaaaatatcaaatatttgcatataaatataatcttaaagttcagtctatttaatgttcaatgaaatatttctgcctgtataatctttaaagatgttgaacatatattcacattaaatatgattatgtacttgttacaaggataaggttatatatgaataaagttacaaaaacagctattgcgggcttacttgcgcttttcgcaggtaatgccgctgcaaccgatggtgaaatagtttttgatggcgagattttaaaatccgcttgtgaaatcaatgactctgataagaaaattgaagttgctcttggtcactataatgccgaacagtttcgtaatattggcgagcgtagcccaaaaattccattcactattcctttagttaactgcccaatgactgggtgggagcacgataacggcaacgttgaagcgtctttccgtctatggctggaaacgcgagataatggcaccgtccctaacttccctaatctggcaaaagtaggctcttttgctggcatagcggcaacaggtgtgggtatccgtattgacgatgcggaaagcggaaacattatgccactgaatgctatgggcaatgataacacggtttatcagatcccggcggaatccaatggtattgtcaatgttgacctcatcgcttactacgtaagtaccgtagttccaagtgaaatcaccccaggggaagcagacgctatcgttaacgtaacgctggattaccgttaatacgttagggcgttatctgacctgtcagataacgcccttttccttcctctttctcgttgtatcaggttgaaaaataactatgagtaaacgaacattcgcggtgatattaaccttgttgtgtagcttctgtattggccaggcgcttgcaggaggaatcgttttacagcgaacgcgagtgatctatgatgccagccgcaaagaggctgcgttacctgtcgcaaacaaaggcgcagaaacgccttatttactgcaaagttgggtagataatatagatggtaaaagccgtgccccatttattataaccccaccgctatttcgtcttgaggctggcgatgacagtagtctgcgaattattaaaacagctgataacctgcctgaaaataaagagagcctgttctacattaatgttcgtgccattccagcaaagaaaaaaagtgatgatgttaatgctaacgagttgacgctggtatttaaaacacggatcaaaatgttttatcgccccgcacacctgaagggacgggtaaacgatgcgtggaaaagtctggaatttaaacgtagtgaccatagtctcaatatatataacccaactgaatattacgtcgtatttgccggactggcagtcgataaaaccgatctcacaagcaaaattgaatatatcgcgcccggagaacataaacagttaccacttcctgcatctggcggaaagaacgtgaaatgggctgcgatcaatgattatggcggcagttccgggacagaaactcgtccactgcaataaaaaatataaaaacacaggtcatcagggaatgccacaacgacaccaccagggacataaacgcacaccgaaacagttggcgctcatcatcaaacgttgtttgccgatggtgctcactggcagcggcatgctttgcactaccgctaacgccgaagagtattatttcgaccccattatgctggaaaccacaaaaagtggtatgcaaacaaccgatctgagccgttttagtaaaaaatatgcacaactaccaggaacttatcaggttgatatctggctgaataaaaagaaggttagtcagaaaaaaattacatttaccgccaatgcagagcaacttctgcagccacagtttacggtagaacaactacgtgagctgggtattaaggtggatgaaatcccggcgctggctgaaaaagatgacgatagcgtgatcaacagccttgaacaaatcattcccggtacagctgctgaatttgatttcaatcatcagcaacttaatttgagcattccccaaattgcactgtaccgtgatgcaagaggttacgtctccccttctcgttgggacgatggtataccaacgctgtttaccaactacagctttacaggttctgataaccgttaccgccagggcaatcgtagccaacgacagtacctgaatatgcaaaatggtgctaattttggcccctggcgattacgcaactattccacatggacacgcaacgatcagacaagtagctggaataccatcagtagttatttacaacgtgatatcaaggcgttgaagtctcagttgcttctgggagaaagcgccaccagcggcagtattttttccagctacacctttactggcgtgcaactcgcttccgacgataatatgttgccaaacagccagcgcggatttgccccaacggtacgcggtatcgcaaacagtagtgcaatcgtgactatcaggcaaaatggttatgtgatctatcaaagcaacgtgagtgcgggtgcctttgaaattaacgatctctacccctcttccaacagcggcgatttagaagtcacgattgaagaaagtgacggtacacaacgtcgctttatccagccttattctagtttacccatgatgcagcgacctgggcatctaaagtatagcgcgaccgctggacgctatcgcgctgatgcaaacagtgatagcaaggaacccgaatttgctgaagccacggcaatatatggtttgaataatacttttacgctgtatggcggcctgctcggttctgaagattattatgcgctggggatcggtatcggcggcacacttggcgcactgggcgcgttgagcatggatatcaacagagctgacacccaattcgataaccagcactcttttcatggctatcaatggcgtacgcagtacatcaaagatatcccggaaaccaacaccaatatcgctgtcagctactatcgctataccaacgatggctattttagttttaatgaagccaatacccgcaattgggactataacagtcgccaaaaaagtgaaattcaattcaacatcagccagacaatatttgatggggtaagtctgtatgcctccggtagccagcaagactattggggcaataacgataaaaacaggaatatctctgttggggtttccggccagcaatggggagttggttacagcctgaattatcaatacagccgctacactgatcaaaataatgaccgcgcactctctttgaatctcagtattccgttagaacgctggttaccgcgtagccgggtttcctatcagatgaccagccagaaagatcgcccaacccaacatgaaatgcgtcttgatggcagtctgctggatgatggtcgcctgagctatagcctggaacaaagtctggatgacgataacaaccataacagtagcctgaacgccagttaccgtagtccttatggcaccttcagtgccggatacagctacggtaatgacagcagccaatacaattacggcgttaccggcggcgtggttatccatcctcatggcgtgacgctcagccaatatctgggcaacgcttttgcgcttatcgatgctaacggagcatctggcgtgaggatacaaaactatccggggattgctaccgatccttttggctatgcagtggttccttatctcacaacttatcaggaaaaccgtctcagcgtagatactacgcagctgcccgataacgtcgatcttgaacaaacaacacagtttgtggtgcccaacagaggtgcaatggtagcggcgcgtttcaacgccaatatcggttatcgcgtacttgttacagtcagcgatcgcaacggtaaaccgttgccctttggcgctcttgccagcaacgatgatacggggcaacaaagtatcgtcgatgagggcggcatactatatctctctgggataagcagtaaaagtcaaagctggactgtacgctggggaaatcaggcagatcaacaatgtcagtttgctttcagtacaccggatagtgaacctacaacctctgtattacaaggcacagcgcagtgccattaaggataaaaaaatgaaaagagcgcctcttataacaggtcttttgttgatatccacatcctgcgcttatgcctccagtggagggtgtggagccgacagcactagcggtgcgacaaattacagcagtgtggttgatgatgttacggtgaaccagacagataacgtgacaggacgggagtttacctctgcaacgctaagtagcactaactggcaatacgcctgttcctgctctgcgggtaaggcagttaaacttgtctatatggtcagccccgtacttaccaccactggacatcagacaggatattacaaactcaatgacagcctggatattaaaaccacattacaggcaaacgacattccaggactcacaaccgaccaggttgtctctgttaacacccgattcacacagataaaaaacaacacggtatattctgctgcaacccaaacgggtgtttgccagggtgatacgtctcgttatggacccgttaatattggtgcgaacaccacctttaccctgtatgtcaccaagccatttctcggcagcatgaccattccgaaaacggatattgccgtcattaaaggcgcgtgggtcgatggaatgggaagcccgtctacaggtgacttccatgatttagtcaagttaagcattcagggaaatctcaccgccccacagagctgcaaaattaatcagggcgatgttattaaggttaattttggattcatcaatggtcagaagtttaccacccgcaatgccatgccagacggttttactccagtagactttgatatcacttatgactgtggtgatactagtaagattaaaaacagcttgcaaatgcgcatcgacggtacaactggggtagtagaccagtacaacctggtcgccaggcgaagaagtagtgacaatgtgcccgatgtcggtattcgtattgaaaatctcggcggcggagttgcaaatattccttttcagaacggtatccttcccgttgatccttccgggcatggcaccgtcaatatgcgcgcctggccagttaatctggtcggtggtgagctggaaacaggaaaatttcagggcacagccaccattaccgtcatcgtgcggtaaaagaagacgttgcgttttgattaacgcaacgcttcggcactgttacccctgctgctccagcgcatacttatacagcgcatttttcttcacgccgtgaatttctgcggccagcgccgccgcttttttcagcggcagttctgcctgtagcagcgccagcgtgcgcagggcatcggcgggtaagtcttcttcctgtgctttatgaccttcgacaatcagcaccatttcgcctttgcgacggttttcatcttcctttacccacgccagcagctcgccaacgggcgcgccgtgaatggtttcccaggttttggtcagctcacgcgccagaaccacgtagcgggattcgcctaataccgcaacgatatcttccaggctatctaacagacggtgggtagattcataaaaaatcagcgtgcgcggctccgcttcaatggcttttagcgcatcacggcggcctttacttttggcaggtaaaaagccttcgtaacagaaacggtcagagggtaaacccgctgcgcttaacgcagtgatagcagcacacggcccgggtagcggcaccacgcggatccccgcttcacggcaggtacgcaccagatggtagccaggatcgttaattagcggcgttccggcatcggaaaccagcgcaatgttttgcccctcttgcagcttcgccagcagcgtttcagctttttgttgttcgttatggtcgtgcagcgcaaacaaccgggcattaatcccaaaatgttgcagcaataaaccggtgtgacgagtatcctcggcggcaatcagatcaacggcctgtaatacctctaacgcacgctgggtgatatccgccagattgccgattggcgtcggtacaatgtaaagctggccctgagaattatccgcgctttggtgttgtttcattgtgtcgtccgtattgccgatttaatattgagcattgcgtaaaaaaaatatcactggatacattatggtacccagtacattttctcgtttgaaagccgcgcgttgtctgcctgttgttctggcagccctgattttcgccggttgtggcacccatactcccgatcagtccactgcttatatgcagggcacggcgcaggctgattctgccttttatcttcagcagatgcagcaaagctctgatgataccaggatcaactggcaattactcgccattcgtgcactggtgaaagaaggtaaaaccgggcaggcggttgagttgtttaaccaactaccgcaagaactgaacgatgctcagcgtcgcgagaaaacactgctggcggtagagattaaactggcgcagaaagattttgctggcgcgcaaaacttgctggcgaaaatcacacctgccgatttagaacaaaaccagcaagcgcgttactggcaggcaaaaatcgatgccagccaggggcgtccttccattgatttactgcgcgcgttaattgctcaggaaccgctgcttggcgcgaaagaaaaacagcagaatattgatgccacctggcaggcgctctcctccatgactcaggaacaggcgaatacgctggtgatcaacgccgacgaaaatattctgcaaggctggctggatctgcagcgcgtctggtttgataaccgtaacgatcccgacatgatgaaagccgggatcgccgactggcagaaacgttatccgaacaatccgggcgcgaaaatgctgccaacgcagttggttaacgtaaaagcgtttaaaccagccagcaccaacaaaatcgccctgctgttgccactgaatggccaggcagcggtatttggtcgcactattcagcaaggctttgaagcggcgaaaaatatcggcactcagccagtggcagctcaggtagctgccgcacctgccgcagacgtagctgaacaacctcagccgcaaaccgtggatggcgttgccagcccggcacaagccagcgttagcgatctgaccggtgaacagcctgcagcccagccggtgcctgtaagcgccccggcgacaagcaccgcagcggtaagcgcacccgcaaatccatccgcagagctgaaaatctacgataccagtagtcaaccacttagccagatcttaagccaggttcagcaggatggcgcgagtattgtggtcggtccgttgctgaaaaataacgttgaagagttgctgaagagcaacactccgctgaacgtactggcactgaaccagccggagaatatcgaaaatcgcgtcaatatttgttacttcgcgcttagtccggaagacgaagcgcgcgatgcagcgcgtcatattcgtgaccagggtaaacaagcgccgctggtgctgatcccacgcagtagtttgggcgatcgcgtagccaatgcgtttgcgcaagagtggcagaaactgggcggcggcaccgttctgcaacaaaaatttggttccaccagcgaattacgcgcgggtgttaacggcggttctggtattgctttaacgggtagcccgattactctcagagcgacaaccgactccggcatgacgaccaacaatccaacgctgcaaaccacgccaaccgatgaccagttcaccaataatggcggtcgtgtcgatgcggtgtacattgtggcaacgccgggtgaaatcgcttttatcaaaccgatgatcgccatgcgtaacggtagccagagcggtgcaacgctgtacgccagctcccgcagtgcgcaagggaccgctggcccggatttccgactggagatggaaggcttgcagtacagcgaaatcccgatgctggcaggcggtaatctaccgttaatgcagcaggcactcagcgcggtgaataacgattatagtctggctcgcatgtatgcgatgggcgtcgatgcctggagcctggcaaatcatttcagtcaaatgcgccaggttcagggttttgaaatcaacggtaataccggaagcctgacggctaacccggattgcgtgattaacaggaacttaagttggctacagtaccaacaaggtcaggtagtccccgtcagttaaattaagtgattaacaggaacttatcatggctacagtaccaacaaggagtggtagtccccgtcagttaaccaccaaacagaccggcgatgcgtgggaagcacaagcgcgtcgctggctggaaggcaaaggactgcggtttatcgccgctaacgtgaacgagcgtggcggcgagatcgatctgataatgcgtgaaggccggaccaccatttttgtcgaggtacgctatcgccgctctgcgctttatggcggcgcggcagccagtgtgacccgcagcaaacaacacaaattattacagactgcccgcttgtggctcgcgcgtcataatgggagttttgatactgtggattgccggttcgatgtggtagccttcaccgggaatgaggttgagtggattaaggatgcctttaatgaccacagttaattaaggtttaaggattagcgtgcaagaaagaattaaagcttgcttcactgaaagcattcaaactcaaattgcggcggcagaggcgcttccggatgccatctcccgtgcagccatgacgctggttcagtctctgctcaatggcaacaaaatcctctgttgtggtaatggaacttccgctgccaatgcacagcattttgctgccagcatgatcaaccgtttcgaaacggagcggcccagcttacctgccattgcactaaatactgataatgttgtcttaacggcgattgccaacgatcgcttacatgatgaagtgtatgcaaaacaggtgcgggcgctgggtcatgcgggagatgtattgttagccatttccacccgtggcaacagccgcgatattgttaaagcagttgaagccgccgttacgcgtgatatgaccattgtggcattgaccggctatgacggcggcgaacttgcaggtttgttagggccacaggatgtggagatccgcattcctagccatcgtagtgctcgcattcaggaaatgcatatgctgacggtaaattgcctgtgcgatctgatcgataacacgcttttccctcaccaggatgattaaggagaatacatgaaggcattaagcccaatcgcagtccttatttccgcgctgctgttgcaaggttgtgttgccgctgccgtagtgggtaccgctgctgtgggtaccaaagccgcaactgacccacgcagtgtcggcacccaggtggacgatggtaccctggaagtgcgcgtgaacagcgcattgagcaaagacgaacagattaagaaagaagcgcgcattaatgtaacggcctatcagggcaaagtgctgctggttgggcagagtccaaatgctgaacttagcgctcgcgccaaacagattgctatgggcgtagacggtgccaacgaagtgtataacgagattcgtcagggccagccgattggtctgggcgaagcatctaacgatacgtggatcaccaccaaagtgcgtagccagctcttaaccagcgacctggtgaaaagctccaacgtgaaagtgaccaccgaaaacggtgaagtgttcctgatggggctggtgactgaacgtgaagcgaaagcggcggcagatattgccagccgggtgagcggcgtgaagcgggtaactacggcgtttacgtttattaaataacagccccttgtaatgcctgatgcgacgcttgccgcgtcttatcaggcctacaacgatacaaaccgtaggtcagataaggcgtttacgccgcatccgacatgttttccctcaaatcagaacaacagcgccagcccgccgacaatcacaccagacactgccaccatcgcccctgtcagccataaggctttcgccgggaacgctttgcgcagcataatcagactcggcaaactcactgccgggagcgtcatcaacaatgccagcgccggagcggttcccatacctgccagcatcatcgtttgtacaatcggaatttctgctgccgtgggaatgacaaacaagcatcctgctaccgccatcgccaccacccacatcaggctgttatcgacagcaccatcggcatgggggaataaccagacgcgagcggcacccaacaccagtactgcaaggatgtaaaccgggatcgtactccagaaaagcgtccatagcgccctgccccagcggctaaaaaacccgccctgtgcttccggtatgtcaatttcgaccggtgcctgcgtttgcggtgtttcacgcacccatttttgcaccagcgtcgcaatcagcaacaccatcaccagcccggccaccagacgaatcgccgcaaaaccccagccgaggacaaagcccataaacaccagcgtcgccgggtttaacaccggattgcccatccagaatgccagcgcaccgcccatgctcacctgttggcgacgcattcccgccgcgaccggagccgcacagcaggtacacatcatgcccggcaagctaaacagcgttcccagcagcgtgccgcgaaagcggctttgcccaagcgtacgcaacaaccagtcacgcgggatcagcacctgaatcaagctaccgaggatcacccccagcaccgccgctttccataccgcgaggaaatagatcatcgcgtaatccaacgccgcctgccatgggttagcatccgcctgcgcaaggatagatttaccgatactgtgggtttcggcagcagtaaacgctttgccgtagtaaggttcccatttcacataccagagaccggcaatgacaacgagaaagaaaagcgcgggtttccaccactgaatgggcgttgccgcctgagaactagactgaccagtcatagcattccccaggaataagttatgataattgagcgcgtgaatattacgctcactatcaattcttgggaataattattcagctcttttgcgtaattcactagagcttaaaatcgtcacgccttcatgctcaggccgcatgctctctgccagcatgacccgcgccacgtctctcgcatcaatggatttccagttacctggtaacaaacggaacagcggcgcaaaaagcgtttcgttcatccgctgtttgctacgatcgcccagtaacatgctcgggcgagcaatggtcaatttcggccagttctgggcgattaatgcttcttccatctcccctttgacgcggttatagaaaaacgggctgtgggcattggcacccatcgcactgactaccaacatatgctgcgcgcccagtcgccgcccggttaatgcggtatccactaccagcgtgtaatcggcatgaataaacgcctctttgctccccgcttctcgccgcgtggtgccgagacaacaaaacacaatgtcgatgggatcggtgacctgcgccaacgcgtcactcagttgcggatcatggggattaaacaccccgggcatatcgcccaacggacgtcgcgtcggcgcagcaatggcgttaactttcggttcgttaatcaacatccgcagcaggtgaccgcccaccagccccgttgcgcctgtaatcagtacctgactcatcttcgctcctttacagaattgtctgccttgcgctccacggctcatgcaccaggcttaatagaccatgaggtaattatccccgattgtgggaaattcgcctcatccaatgcaacaacgcggaggaagcatgagtaagaaaattgccgttttaatcactgatgaatttgaggatagtgaatttactagtcccgcagacgagttccgtaaagccggacacgaagtgattaccattgaaaaacaagcgggtaaaacggtgaaaggcaaaaaaggagaagccagcgtgaccatcgataaatccatcgatgaagtgacgcctgcggagtttgatgccctgctgctaccgggcggccatagtccggattatctgcgtggggacaaccgttttgtcacctttacccgtgattttgtgaatagtggcaaaccggtgtttgccatctgtcacggcccgcagttgctgatcagcgccgatgtgattcgggggcgcaaactgaccgcagttaaaccgatcattattgatgttaaaaatgcgggcgcggaattttacgatcaggaagtcgtggttgataaagatcagctggttaccagccggacaccggacgatctgccagcgtttaaccgcgaggcgttacgcctgctcggtgcctgattacgcctgctcggtgccactgtcgcgtagccaaatcatttttttaccaaagcccagcgtgttgtcggtgaatttgatttcatcgagccggatttcccacaccggggcgctcagcattctggcaaccggaaagcgacgattgtacgccttgcgcgcgaggtcgctttcctcaccttccagcctgcggatctcacctttaaactgcacaccgcgaattaacgctaccgttttcggctgaccgtttaccgttccggcaaccgcagcctgcggcccactcatctgcgcgtggcgcgttttttcttccgtcaaaatgtagaaggcgactttctgcgcatcaaaaagataaaaggcattagcgcaccagagttccccttcctgctgcacacaccaagtgacaacatgttgttttgccagccaacggctgatggcgatgagtgtttccattgctgttctcttttatactgtgggcctgaccttaacatgcgacgcagacgatgacaccctggtttctttacttgatccgtaccgccgacaataagctttataccgggatcaccacggatgtcgaacgccgctatcagcagcaccaaagcggcaaaggggcgaaagcactgcgcgggaaaggagaactaacgctggtgttttccgcgccagtgggcgatcgtagcctggcgttacgggcggaatatcgcgttaagcaactgaccaaacggcaaaaagagcgtctggtagcggaaggcgcagggtttgcagagctgttaagcagtctgcaaaccccggagattaaaagcgattgaaatgctcgtgatactcaaccaggccggtaacgccattcagcgcgtcatccgctaaacgatgtacctggaaggcgctttcagtgcccggccagcggcaacgcagatcgtgatgcgccgccagttcaaagccgaaacgactgtacagcgccggatcgcccagcgtcaccactgcggcatagccgaactcattaaggctatcgagtccttcatagaccagttggcgtgccagcccctgtccacggtatttttcatcaaccgccaacggtgccatgccgacccattgcaggtcttcgccctgcacatcaaccggactaaatgccacatagccaatgacctgaccttcgtcatctgtcgccaccagccccagcgtcagaaagccatcttcacgcagatcgtgaaccagcttcgcttccgcatcactttcgaaactgcgacgcagcagggcatcaatacccggcgcatcaatgggaatttctactcgaattagcatggttcacctacgcttgtctgtttggtttcaggcgcggttttcattcccgcctcaacaaaatccgccagttgcagcagcatcatgcgtaaggctttcggcatttgctccagttcaatggcgtccatcaggtttttcacatacagccccagctccgtatcgccttcaatcaccagccgacgctggaagaagagcgtatccggatcttgtttacgcgccgcaatcatcagcagatcgctggcgtcggcactaaaactcacatcagcttgcgcgttctggctaacgaccagtttgccattcaccacgctggtaaaccattgcaggtcaatatcacgcacatgaatacttaaccagcggccttcaagaaactccagctcgccatcatccagcgcctggcggaattgccagcttaagacctgctcaagaacctggcgttttagcgcaaatggcgtcagttttaccggtacactcaacagagatggccccaaatgcacaatacgggaacgcagtttatccaacacgagttttactccctgtttcaacaatcatcctattttgccatatcagaaaaataacatagcggtataaatcaacaattccatatgaaattgctgctaccaccaatacaactttaactgccttaaatcaaaaattgtcgcagcaaggttaactaaaatcccagttcgttaacatttttgcgttttgatagcgcaaccttcaggaaaaattatggagctgctctgccctgccggaaatctcccggcgcttaaggcggccatcgaaaacggcgcagatgctgtttatatcgggctaaaagatgataccaatgcccgtcacttcgccggccttaactttaccgagaaaaaattgcaggaagcggtgagttttgtccatcaacatcgccgcaaacttcacatcgcgattaacacttttgcgcatccggacggttacgcccgttggcagcgcgccgtggatatggcggcgcagctgggtgccgacgcgctgatcctcgccgacctcgccatgctggagtacgccgccgagcgttatccgcatattgagcgccacgtaagcgtgcaggctagcgcgaccaatgaagaggcgattaacttttatcatcgccattttgacgttgctcgcgtggtgctgccgcgcgtgttgagcattcatcaggtgaaacaactggcacgggtcacacctgtaccactggaagtctttgctttcggcagcctgtgcattatgagcgaaggtcgttgctatctgagcagctatctgacgggtgagagccccaacaccataggcgcgtgttctccggcccgtttcgtgcgctggcaacaaacgccgcaggggctggaatcccgcctgaacgaagtgctgatcgaccgttatcaggacggcgaaaacgcaggttatccgacgctatgtaaagggcgttatctggtggacggcgagcgctatcacgcgctggaagaaccaaccagtctcaataccctggaactgctgccggagttaatggcggcgaatattgctagcgtgaaaattgaaggccgccagcgtagcccggcgtatgtcagccaggtggcgaaagtctggcgtcaggctatcgaccgttgtaaggccgatccgcaaaactttgtaccgcaaagcgcgtggatggagacgctcgggagcatgtccgaaggcacgcaaaccactcttggcgcatatcaccgtaaatggcagtgagaaaagcaatgaaatattccttagggccagtgctgtggtactggccaaaagagacgctggaagaattttatcagcaggccgccaccagcagcgccgacgtgatttatcttggtgaagcggtatgcagcaagcgtcgggcaaccaaagttggcgactggctggagatggcaaaaagcctcgccgggagtggtaagcagattgtgctctccacgctggcgctggtgcaggcaagttctgaactgggcgaactgaaacgctatgttgagaacggtgagtttctgattgaagccagcgatctcggcgtggtgaatatgtgcgctgaacgcaaactgccgttcgtcgccgggcacgcgctgaactgctacaacgcggtgacactgaaaatattgctcaaacagggcatgatgcgctggtgtatgccagtggagctttcccgcgactggctggtgaatctgcttaatcagtgcgatgagctgggcattcgtaaccagtttgaagtggaagtcctgagctacggtcatctgccgctggcctactccgcccgctgctttaccgcgcgtagcgaagaccgcccgaaagatgagtgtgaaacctgctgcattaagtatccgaacgggcgcaacgtgctgagccaggaaaaccaacaagtgtttgtactcaatggcattcagaccatgagcggctacgtttacaacctcggtaacgagctggcatccatgcagggcctggttgatgtggtccgcctgagtccgcagggtactgacactttcgcgatgctcgacgccttccgcgctaatgaaaatggcgctgcaccactgccgttgacggcgaacagcgactgtaacggctactggcggcggctggcaggactggagctgcaagcctaagtaaatagctcactttgttaacaactttaactactctttaatgcagtattaaagattaatcggtaacaaagtgagctgttatgactgataaaaccattgcgtttagcctactcgatctggcccccattcccgaaggttctagtgcgcgagaagcattctcccactctctcgatctcgcccgtctggctgaaaagcgcggctatcatcgctactggctggcagaacaccacaatatgactggcattgccagtgctgccacgagcgtattgatcggctatctggcggcgaataccaccacgctgcatctggggtctggcggcgtgatgttgcctaaccacagtccgttggtcattgcagaacagttcggcacgcttaatacactctatccggggcgaatcgatttggggctgggtcgtgctccgggtagtgaccaacggacaatgatggcgctacgtcgtcatatgagcggcgatattgataatttcccccgcgatgtggcggagctggtggactggtttgacgcccgcgatcccaatccgcatgtgcgcccggtaccaggctatggcgagaaaatccccgtgtggttgttaggctccagcctttacagcgcgcaactggcggcgcagcttggtctgccgtttgcgtttgccagtcacttcgcgccggatatgctgttccaggcgctgcatctttatcgcagcaacttcaaaccgagtgcacggctggaaaaaccatacgcgatggtgtgcatcaatattatcgccgccgacagcaaccgcgacgctgaatttctgtttaccagtatgcagcaagcctttgtgaagctgcgccgtggcgaaaccgggcaactgccgccgccgattcaaaatatggatcagttctggagtccgtctgagcagtatggcgtgcagcaggcgctgagtatgagcttggtaggtgataaagcgaaagtgcgtcatggcttgcagagcatcctgcgcgaaaccgacgccgatgagattatggtcaacgggcagattttcgaccaccaggcgcggctgcatagctttgagctggcgatggatgttaaggaagagttgttgggataatgtgtcttaacgcgggaagccttatccgagctggcaacgctgtcctacatagacctgataagcgaagcgcatcaggcattgtgtaggcagcagaaatgtcggataaggcaccgctgattactgatacaccggcagtaaattaaagctgcttaaaatatgcaccagtgcgttgccgacgccaaacaccagaatcagcgcaatcatcggcttgccaccccagacgcggaatttcgggctgccaaagcgtttacggcttgcacgggctaacagcgccggaacaattgccgcccagatggtagccgctaaaccagcataaccaatggcgtacaggaatccgttcgggaacaacagcccccccacaactggcggggcaaaggtcagcaatgccgttttcaagcggcccacagcgctgtcgtcgaaaccaaacagatctgccagatagtcaaacaaacccagcgttacgccgaggaagctactcgctaccgcaaagttactgaacacgaccagcagcagatccagactacggctgttcagtacgccgcttaacgcctgtaccagcacatcaatattaccgcccttctctgcaataccgataaactccggacgcgggatgttacccatcgtcgccagcaaccagatggtatacagcgccagcgccatcagcgtaccgtacaccagatatttcacgatggttttcggatctttgccgtaatacttcatcaggcttggcacgttaccgtgataaccaaagcttgccagacagaacggcagggtcatcaacagatacggtgcataagacgcattgctttcggcgacgttgaacaatgtcgcaggctgcacatgccccagcaggctaccaaaggtgaggaagaaggtaatgactttcgcccccagcacaatcgctgtcatgcgactgacggctttagtgctcaaccacaccacaaacgctaccagcaatgcaaaaccaaaacccgccgcccgtgccgggacgtttagactcatctctgcgaaggtgtgatgcagaatgctaccactggcagaaatataggcataggtcaggatatagagcacaaaggcaatggaaatgccgttgaccacgttccagcctttgcccagcaaatctttggtgatggtgtcaaaactgctaccgattctgtaattcaggttagcttccagaatcatcaagccggaatgcagcatacagaaccaggtaaagatcagcgccgccatactccagaaaaaccacgccccggacatgaccactggcagagaaaacatccctgcgccaataatggtgccgccgataatcaccacgccgccaagcaggctcggactcgtttgggtggtggttagtgttgccatgagggcttctctccagtgaaaaatagtgcgactgcgttgttatgcattgcactgtaccagtacacgagtacaaaagacagaaaaaaagccccgatggtaaaaatcggggctgtatatattattttacagattgtgttcgctgttcagcgatgattacgcatcaccaccgaaacgacgacgaccggtagaatcatcacgacgcggagcgcggccttcacgacgttcgccgctaaaacgacgaccatcaccacggccaccttcacggcgttcaccgctgaagttacgaccgccttcacgacgttcgccaccgaaaccacgaccaccgccacgacgctcaccgccagtatgcggctgtgcatcgcccagtaactgcatgttcatcggcttgttgagaatgcgagtgcgcgtaaagtgttgcagcacttcacccggcatacctttcggcagttcgatggtggagtgagaagcaaacagcttgatgttaccaatgtaacggctgctgatgtcgccttcgttagcaatcgcaccaacgatatgacgaacttcaacaccatcatcgcggcccacttcaatgcggtacagctgcatatcgccaacatcacgacgttcacgacgcggacgatcttcacggtcaccacgcgggccacggtcgttacgatcgcgcggaccacggtcatcacggtcacggaattcacgtttcggacgcatcggcgcatctggcggtacgatcagagtacgttcaccctgtgccattttcagcagtgccgcagccagagtttcgagatccagctcttcaccttcagcagtcggctgaattttgctcagcagtgcgcggtattgatccagatcgctgctttccagctgctgctgtactttagcggcgaatttttccagacggcgtttgcctagcagttctgcgttcggcagttctacttccggaatagtcagcttcatagtacgttcaatgttgcgcagcagacgacgctcgcggttctcaacgaacagcagcgcgcggccagcacgacccgcacgaccggtacgaccgatacggtgaacgtaagactcagaatccatcgggatatcgtagttaactaccaggctgatacgctcaacgtccaggccacgggctgcaacgtcggtcgcaatcaggatgtccagacgaccatctttcaggcgttccagtgtctgttcacgcagcgcctggttcatgtcaccgttcagcgcggcgctgttgtagccgttacgctcaagagcttcagccacttccagagtcgcgtttttggtacgaacgaagataatcgccgcatcaaaatcttccgcttccaggaaacgtaccagtgcttcgtttttgcgcataccccagacagtccagtagctctggctgatgtcaggacgggtagtcacgctggactgaatgcgcacttcctgcggctctttcataaagcggcgggtaatgcgacgaatcgcttccggcatggttgcagagaacagagcggtctgatgaccttccgggatctgcgccataatggtttcaacgtcttcgatgaagcccatgcgcagcatttcgtcagcttcatccagaaccagaccgctcagtttagagaggtccagagtgccacgtttcaggtggtccagcagacggcccggagtaccgacaacgatctgcggcccctgacgcagggcgcgtaattgcacgtcataacgctggccgccgtacagagcaaccacatttacgccgcgcatgtgtttagagaaatccgtcattgcttcagcaacctgtaccgccagttcgcgggtcggtgccagcaccagaatctgtggtgctttcagctcaggatcaagattctgcaacagaggtaaagagaatgctgcagtttttccgctccccgtctgggccatacccagaacgtcgcggccattcagcagatgtggaatacactctgcctgaattggagatggtttttcgtaacccagatcgttaagggcttcaaggataggagccttcaggcccagatctgcaaaagtggtttcgaattcagccatgtagtacgtgtgcctcaaaattaatggcggccagtctacataactcatcatgaaattgatcagcaattttcattgaaaagtgtgaaccggctcaaagtaggtgtattaacgaacaacaacgccctcacccgttaaggtgatggcaatcaaaaaagattacgggctgatgtgtacgtcagttattgctggtcgctttctgccaggtcatcttggtcctggcccaggaggcttaattccaacaatgcgtatcggtgctcaacaaagttatgaacgttgttggcaaccgccagtttgaacagtgccgtggcgctgtccaaatcccccagacttaggtagtacttacctaaatagaagttggtttcactgagatgctcagcgaggctggtgttatccgttgcgtccgccttgagcctttccattaacgtttgttcgctaatgttgcccaggtagaactcgacaatgttccatccccactgttccttatcgcttttttcgaagtgctgtttcaacacttctttagcctgcttctcatcgagcttctgctcggcgagataaagccacagactacggaaaggatcattgggatcgtcttgataaaacgccagcagatcatcttgcgctaacttgtcacgaccgccgtaatataatgcgatcccgcgattcaagtgcgcgtagttgtaagttggatcaagctcaagtacagaatcaaacgcttcataggcagcatcaaaattgcctgcctgcgttaaatatatgcctaagtaattgaatacttcaggcatatccggtcggattgccagcgcttggctaaaatcgttacgcgctaatgccctcagaccgagactatcatacaacactccgcgctcatataaaagctgtgcgcgttcgtcatcggttaaagcccgactggcaaggatttgttccatacgtgccagaatcacttcctgctgtaaagtcggttgcaatggtaccgcgaggacttcacttttacgccaggaagtattactgcatcctgcaagcgtaagtgctgtcgcaacgaaacaccagcgcaaaaaaggcttcatttcccactcccgaagaccacggttgaatgaacgtcctgttcccggttgctaacaaggcgtcctgcccggttaaaagccccccgccgcagcggagggcaaatggcaaccttactcgccctgttcagcagccggagcttccggtgctgcagcaggttgagactgctcagtcgcttctttaatgctcagacggatacggccctggcgatcaacttccagaactttcaccggtacttcctgacccatctgcaggtaatcggtcactttctcaacgcgtttgtcagcgatttgagagatgtggaccagaccttctttaccgccgccgatggcaacaaatgcgccaaagtcaacgatacgggtcactttaccagtgtagacgcggcccacttcgatttctgcagtgatctcttcgatacgacgaatagcatgtttcgctttctcgccgtcggtcgctgcaatcttcacagtaccgtcatcttcgatttcgatggtggtgccagtttcttcggtcagagcacggattacagaaccgcctttaccgataacatctttgatcttgtccgggttgatcttgatggtatggatacgcggtgcgaactcagagatatcgccacgcggcgcgttgatcgcctgttccattacgcccaggatatgcagacgcgcacctttagcctggttcagcgcaacctgcatgatctctttggtgataccttcaattttgatatccatctgcagtgcagagataccgtcgcgggaacctgcaactttgaagtccatatcgcccaggtgatcttcgtcgcccaaaatgtcagacagtacaacgtagttgtcgccttctttcaccagacccattgcgatacccgcaacggcagctttgatcggcacacctgcgtccatcagcgccagagacgcgccgcacacggaagccatagaagaggaaccgttggattcagtgatttcagacacaacacgtacggtgtacgggaatttgtccatatccggcatgactgccagcacgccgcgcttcgccagacgaccgtgaccaatttcacgacgcttcggagaaccgaccatgccggtttcgcctacggagtacggagggaagttgtagtggaacaggaaggtatcggtacgttcgcccatcagttcatcaagaacctgcgcgtcacgagcagtacccagcgttgcggtaaccagcgcctgcgtttcaccacgggtgaacagcgcagaaccgtgagtacgcggcagcacgccagtacgcacatccagaccacggatcatatctttttcacgaccgtcgatacgcggttcgcctgccagtacgcggctacgaacaacgtttttctcgatcgcgtgcagaatttcacccagttcgttttcgtccagggtttcgtcttcagcaagcagcgtcgcgatggtttcagatttgatgacatcaacctgcgcataacgctcttgtttgtcggtgatgcggtaagcatcgctcaggcgagcttcagccagtgcagcaacgcgcgcgtttagcgcttcgtttaccggctccggctgccagtcccaacgcggtttaccggcttctttcaccagttcattgatgttctgaataacaacctgctgttgttcatgaccgaacactactgcgcccagcatctggtcttcgctcagcagttgagcttcagattcaaccatcagtacagcggcttcagtaccggcaacaaccagatccagtttgctctctttcagctcgtcctgagtcgggttcagtacgtactggtcattgatgtaacctacgcgggcagcaccaatcgggccattgaacggaataccagacagagacagcgctgcggaagcaccaatcatcgcgacgatatccgggttaacttgcgggttaacagaaaccacggtggcgataacctgaacttcgttgacgaagccttccgggaacagcgggcgaatcgggcggtcaatcagacgcgcgatcagggtttcgccttcgcttgggcggccttcacgacggaagaagctacccgggatacgaccagcagcgtaggtacgctcctgatagttaacggtcagtgggaagaagtcctgacctggtttggcttttttctggccaacaacggtaacgaataccgcggtgtcatccatgctaaccataacagcggcagtagcctgacgagccatcatgccggtttccagagtcacggtgtgttggccgtactggaatttacgaacgatcggattaagcaatgtaatatcctttctctttcttagacagtaccttacggcactggtgttaataccgcttcttctgcgcatcctcgcgactaatgacaaccctaacccagctctatgtgggtaaagcctctcattagccgcgcgaacctctgcaacggaagatcattcatagcaacaatacattagtttccagtgaattgctgccgtcagcttgaaaaaaggggccactcaggcccccttttctgaaactcgcaagaattagcgacgcagacccaggcgctcgatgagctgggtgtaacgtgctacgtctttacgtttcaggtagtcgagcagtttacgacgctgagaaaccatgcgcagcagaccacgacggctgtggtgatcttttttgtgctctgcaaagtggccctgcaggtggttgatctgtgcagtcagcagtgctacctgaacttcggtagaaccggtgtcgtttgcgtcacgaccaaactcagaaacgattttagctgttgcttcagtacttagagacattttaaaactccaaagtatatagaatgaaaggacgccgatctctaattcagcgatcccagtgtacgttacgcaaagtgttaaacaatttacgcgacgttaagcggcagtattctactcgtagcgacctgttatcgcaagacggttaacattacgccgggtattcaaccaccaggcgacgaggcgcaacgcggccttcatcgtcaatttcgcccataccgataaatttgccgttctcaccttccgtgacgcgaaccagtccttccagtggcgcaccagatgtacgaaccgggttaccatttttgaagtaaacagaagacgttaacggaagattcaccaccggatagtcgctagctggactgtccattggcatcagtaatggatcaagtaactccgcggctggaatatcctgctgttcagcttgctcaacaagttcacgcaggtgctccagggtcaccatccgttcaaccggatatttacttaccgccagacggcgcaggtaaataacatgcgcgccacagccgagtttttcacccaggtcatcaatgatggtgcggatataagtgcctttactgcagtgaatttccagctccagctcattgccttcatggcgaataaacagcaattcataaacggtaatcggacgcgcttcacgcggaacttcaatgccctgacgcgcatattcgtacagttttttgccctgatatttcagtgcactatacatgctagggatctgttcgatatcgccacggaaagtatccagtgccgctgccagctgctctgcgctaaaggttaccggacgttcttcaacgatctgtccgtcggcatcagaagtatcggtacgctgtccaagacgcgcaatgacccgatagcgtttgtcggagtccagcagatactgggaaaacttcgtcgcttccccgaggcaaatcggcaacatgccggtcgccagcgggtccagcgcaccggtatgcccggcacggttggcgttatatatacgtttcactttttgcagcgcatcgttgctggacataccctgaggtttatccagcaacaaaacgccgttaatgtcgcgaccgcgacgacgaggacgactcattagtcctccttgctgtcgtccgggttaacacgacgttcttcgtcatgtttgaccacgctggtcaccaggttactcatgcgcatcccttcaaccagagagttgtcgtagaagaaggtcagttccggcacgatacgcaggcgcatcgctttccccagcaggctgcggatgaaaccagaagcttcttgcaacgctttgatgcccgctttaaccgcgtcttcatctttgtcgttgaggaacgtcacatatactttggcatacgccaggtcgcgagacatttcgacaccggaaacggtggtcatcatgcccaggcgaggatctttaatttcacgctgcaggatgagagcgatctctttttgcatttcctgcgctacgcgctgcgggcgaccaaattctttcgccataataaattctcctgacaaaaaaggggctgttagcccctttttaaaattaatttcaggtggaagggctgttcacgttgacctgataagacgcgccagcgtcacatcaggcaatccatgccggatgcagcgtaaacgccttatcccgcatggaaccctaaaaaccttaagcaatggtacgttggatctcgatgatttcgaatacttcgatcacatcgccagtgcggacgtcgttgtagttcttaacgccgataccacattccataccgttacggacttcgttaacgtcatctttgaagcggcgcagggactccagctcgccttcgtagataaccacgttgtcacgcagaacgcggatcgggttgtgacgtttaaccacaccttcggtaaccatacagcctgcgatggcaccaaatttcgggcttttgaacacgtcacgaacttccgccagaccgataatctgctgtttcagttccggagacagcataccgctcatcgccgctttcacttcgtcaatcaggttatagatgacggagtagtaacgcagatccaggctttccgcttcaatcactttacgtgcagaggcatcagcacgtacgttaaagccaaccaggatggcgttggacgccgcagccagggtggcgtcggtttcggtgataccacctacgccagaaccgatgatcttcactttaacttcgtcagtagacagtttcagcaaggagtcggagatcgcttcgacagaaccctgtacgtctgccttcaggacgatattcacttcgtgaacttcgccttcggtcatgttggcgaacatgttctcgagtttagatttctgctgacgcgccagtttaacttcgcggaatttaccctgacgatagagtgcaacttcacgcgctttcttctcgtcacgtacaacggtaacttcatcacccgcagccggtacgccggacaggccgaggatttccaccggaatggacggacccgcttccagcacttcctgacccagttcgttacgcatcgcacgaacacgaccgtattcgaagccacacagaacgatatcgcccttgtgcagagtaccttcacgtaccagaacggtagcaaccggaccacgacctttatcgaggaaggattcgataaccgcaccgctcgccatacctttacgtaccgctttcagctccagaacttccgcctgcagcaggatagcgtccagcagttcatcgataccggtacccgctttcgcagatacgtgtacgaactggctttcaccgccccactcttccggcaggatgccgtactgggagagttcgttcttaacgcgatccggatcagcttctggtttatcgatcttgttcactgcaaccaccaccggtacctgcgccgctttcgcgtgctggattgcttcgatggtctgcggcatcacaccgtcgtcggcagcaacaaccaggactacgatgtccgttgcctgcgcaccacgagcacgcatactagtaaacgcggcgtgccccggggtgtccaggaaggtgatcatgccgttttcagtttcaacgtggtatgcaccaatgtgctgggtaatgccgcccgcttcgccagaggccactttcgtactacgaatgtagtccagcagagaggttttaccgtggtcaacgtgacccatgatggtcacaaccggcgcgcgcggttcagccgcagcacccgtgtcacggtcgctcattaccgcctcttccagctcgttttcacgacgcaggataactttatggcccatctcttcagcaaccagctgtgcggtttcctgatcgataacctggttgatggttgccattgcgcccagtttcatcatcgctttgatgacctgagagcctttaaccgccatcttgttcgccagttcgccaacggtgatagtttcgccgatcacaacgtcacggttaacggcctgagcaggcttctggaagccttgctgcaggctagaacctttacgttttccgcctttaccgccacgtactgctgcgcgtgcttcttcacgatcagctttactttcagcgtgtttgttgcctttcttcggacgcgctgctttcgcgttacgaccacggccacggccgccttcgacttcacgatcgctttcgtcttctgcctggcgagcatgttgagaagtagtgacgtgataatcgctggaatcttcagtcggttccgcgttatcagtccatttgttttcttccgccatacgacgtgcttcttcagcaacgcgacgtgcttcttcttcgagtttacgacgcgcttcttcttcagctttacgcttgagctctgcagcttcctgctcacggcgggctttttcagcctgggcgtttttagtcatatcgtcttgttgattgctcactttgtctttttccgcagcttcacgtttcgcttgttcagcagcttcacgcttagcttgttctgcggcctcacgttcagctttttgttgcgcctcgcgtttagcgctttcttctgcctcacgacgggcttgctcttccgcttcacgctgcgcttgctcttccgctgcaaggcgttcagcctcttgcggatcgcgtttcacaaaggtgcgtttcttgcggacttcgatttgtacgcttttgctttttccaccggtaccaggaatgttaagggtgctgcgtgttttacgttgcagcgtcaatttgtccgggccactatttttctgattcaggtggtcaatcaaagtctgtttctcttgtgcagacacagagtcgtcagcagacttccggatacctgcatcagcaaattgctgtaccaggcgttccacggaggtctgtcgctctgcggccagcgttttaatcgttacatctgtcatgctgttccttcctgctacagtttattacgcttcgtcaccgaaccagcaaatattacgggcagccataatcagtgctccggctttttcgtcggtcaacccttcgatatcagccagatcatcaatgccctgttcggcgagatcttccagcgtacaaacgccacgggcggccagtttgaatgccaaatcacgatctaccccttcaaggttcagcagatcgtcagccggtttgttatcaccgaggctttcttcctgggcctgtgcaatggtggccagtgcatttttagcacgctcgcgcagtgcttcaacggtcggctcatcaaggccttcgatttccaacagctctttcatcggcacataggccaattcttccagcgtgctgaagccttcttctaccagaacagtcgcgaagtcttcgtcgatgtcgagatatttggtgaaggtgtcgatcgctgcgtgcgcttccgcctgatgcttagcctgcaggtcgtcaacggtcatcacgttgagttcccaaccgctcagctggctagccagacgcacgttctgaccgttacggccaatcgcctgcgccaggttaccggcttcaacggcgatatccatggtgtgtttatcttcatccaccacgatagaagcaacgtctgccggtgccattgcgttaatcacgaactgcgccgggttatcatcccacaggacgatatcgatacgctcgccacccagttcagtagacaccgcctgaacacgcgcgccacgcatacctacgcaagcacctaccggatcgatacgtttatcgttggttttcaccgcgattttcgcacgagaacccggatcgcgagccgctgctttaatttcaatcacttcttcgccgatttctggcacttcaatacggaacagttcgatcagcatttccggcttggaacgagtgacgaacagttgcgcgccacgcgcttccgggcgaacggaatagagcacgccacgaacgcggtcgccagggcggaagttttcacgcggcagcatatcttcgcgcaggatcacggcttcagcgttgttgcccagatccagagagatgttgtcgcggtttacttttttcaccacgccggtgatgatttcaccttcgtgttcacggaactgatcaaccaccatcgcacgttcggcttcacgcactttctgcacgataacctgttttgccgtctgggtagtgatacggtcaaaggtaacagactcaatctgatcttcaacgtaatcgcccaggttcaggctttcatcttcataacgtgcggcttcaagggtgatttccttggtcggctgggtgacttcatcaacaactaaccagcgacggaaagtgtcaaaatcaccgcttttgcgatcgatctgtacgcggacgtcgatctcttgttcatattttttctttgttgctgtcgccagcgcgctttccaatgcttcgaaaatcttctcgcgaggtagcgccttttcattggatacggcttcaactacagccaaaatttctttgttcatcgcgggcttttcacctcatccagactattaaaagtggggaaccaggttcgccttctggatattactcagcgcgaacacttcatctttaccttcgacggtaactgtgatcatttcaccgtctaccgctttgataacgccctgccatttacgacggttttgtaccgccatacggagaaccagagtcacctcttctccgacaaaacgggcgtagtgttcagccgtgaacagtgggcgatcgagacccggactggagacttccaggttataagcaacggtgatgggatcttcaacatccagcacagcacttacctggtggctcacatcagcacaatcatcaacattgatgccatcttcactatcaatatagatgcgcagtgtggatgtgcgaccgcgaataaattcgatgccaaccagttcaaaacccagggcctcaactggcgcagtaatcatctctgttaatttttgctctaatgtggacaagcccacccccaagacataaaaaaagggcctaaagcccagttattctgtagtcagataacaaaaaaccccgataaatcggggctttatataactgaaccctataaccgcaactgcggtctggagcactttccagaaggattttttcaaatcccactacgaaggccgaagtcttcacagtatatttgaaaaaggactctaagggaaagtggttgcgggggccggatttgaaccgacgatcttcgggttatgagcccgacgagctaccaggctgctccaccccgcgcctgaaacgtggcaaattctactcgttttgggtaaaaaatgcaaatactgctgggatttggtgtaccgagacgggacgtaaaatctgcaggcattatagtgatccacgccacattttgtcaacgtttattgctaatcatgtgaatgaatatccagttcactttcatttgttgaatacttttgccttctcctgctctcccttaagcgcattattttacaaaaaacacactaaactcttcctgtctccgataaaagatgattaaatgaaaactcatttattttgcataaaaattcagtgagagcggaaatccaggctcatcatcagttaattaagcagggtgttattttatgacgacgattctcaagcatctcccggtaggtcaacgtattggtatcgctttttctggcggtctggacaccagtgccgcactgctgtggatgcgacaaaagggagcggttccttatgcatatactgcaaacctgggccagccagacgaagaggattatgatgcgatccctcgtcgtgccatggaatacggcgcggagaacgcacgtctgatcgactgccgcaaacaactggtggccgaaggtattgccgctattcagtgtggcgcatttcataacaccaccggcggcctgacctatttcaacacgacgccgctgggccgcgccgtgactggtaccatgctggttgctgcgatgaaagaagatggcgtgaatatctggggtgacggtagcacctacaaaggaaacgatatcgaacgtttctatcgttatggtctgctgaccaatgctgaactgcagatttacaaaccgtggcttgatactgactttattgatgaactgggcggccgtcatgagatgtctgaatttatgattgcctgcggtttcgactacaaaatgtctgtcgaaaaagcctactccacagactccaacatgcttggtgcaacgcatgaagcgaaggatctggaatacctcaactccagcgtcaaaatcgtcaacccgattatgggcgtgaaattctgggatgagagcgtgaagatcccggcagaagaagtcacagtacgctttgaacaaggtcatccggtggcgctgaacggtaaaacctttagcgacgacgtagaaatgatgctggaagctaaccgcatcggcggtcgtcacggcctgggcatgagcgaccagattgaaaaccgtatcatcgaagcgaaaagccgtggtatttacgaagctccggggatggcactgctgcacattgcgtatgaacgcctgttgaccggtattcacaacgaagacaccattgagcagtatcacgcgcatggtcgtcagttgggccgtctgctgtaccaggggcgttggtttgactcccaggcgctgatgctgcgtgactctctgcaacgctgggttgccagccagatcactggtgaagttaccctggagctgcgccgtgggaacgattatagtatcctgaataccgtcagtgagaacctgacctacaagccagagcgtctgacgatggaaaaaggcgacagcgtgttcagcccagatgatcgtattggtcaattgaccatgcgtaacctggatatcactgatacccgcgagaaacttttcggttatgccaaaactggcctgctttcctcctctgccgctagtggcgtgccgcaggtggagaatctggaaaacaaaggccagtaattcgacatcaaccctgcccttcaggggtggggttaccttgcttatcctctgtaaactcctttctgagcatcacataatcgaaaacatcatggtttgcatccacaacccgactgtctcctttatagtgtgcaatcacttcctcaagcgtttgcggctgttccggctttgttacccccatccacgcattaataaggtaattattgtaagctgtgctaaagatgttgttttccgttgtgcgatccacgccatccccaagaacggggctataccagataaacatcgggacatgatatgcctgctggctagcctccctgcctccatgaaaatagacgttcttcttcgtagggtcacgttccaggccgtggtcggcaaaatacatgacgctggcgcggcgatcttttaataattcaaaaacctgacctagcaaactatctgtgtaatgaatggagttgtcatagcaggcatcctgatcgtcctgcggttgaaacacggcgctggattgcggataggcgctacaagccggttcatggcttccatttaaatgaagaacaatcagtttcttttgctgcgtattttgctgtaatgcttggcttaaatgcggcaacaacaattcatcaaatcctctgacataaactgtttccatggcgcgcatggcgatactggtaactgctgtaccattctgccgaaaagcggattggctgcttagccagaaagtctgaaatcctgcttgattagccatattaataatgttgtcggggtaattatgaatgtcatgactcaaaacagaatcagcagttaaagaaaggggaacgctcagcgcagtgtaaggtgcgccgcttattgcttgattaaacagtttgatctgttttctttgtgcttcaacttgcggtgtcgtagagcgtgtatatccatacaaagacatattgtcgacacgtacagactcccccacaatcaacacgtaggtatcaatacctgtatccctgacacttaattgaaaatacggcaccgtgtttgcaatactgagtaatctttgatgctctttcgctgctaaagcaaaatagttgagattgaaaaacggcgtataggtagcaaatcggctcgctagtatatatggactgaacgcttttttattttttgcatctttataagcaaattgacaagcggaaaataaactgccgctaatgacaatcagcaataatattcctgtcactttttttgtcggcaaggaaacatcatattttattattactgccaaaaaaagaagggataaaaaagcaaaggcacatagataagggatatacatccccagcattttgacaacttcatccggatcactctggagcacactaatcgcaaatccatcattgaaagttgtaccaaaggtacaccaactatagaggctaatactcatgtctgccgcagtcagtaacacaaatggtgcggcaacaagcaggcgaagcggaagggaacttatacgttttacaaccaggatggtcagaacgaagaacagcaagcgctgaaccatatgcgctccggaagaagcgactaagttcgtaataccaaaaacaataacacaaagatacaacaaccaatgagatttaaaagttctagcaaatttgttgaatactgtcatccagaaatccaagttcacaaccaatataaacaattatcaacaatgtttaattttatatcagacatgtttttcaactctgatccatatcagaacgaaacactgttagttttttctttttaaatgatgcggccattgcgttctcagtaattaaataacattatcaatgcgtctctaaacattacgcagaacgtagccatcagtcgttatactgacaggagcaggatggtttatcgagaagtaaacatatccgtattcgtaccggaactggagttgacacaataaagtgccaattatgtcagtagaagggaaaaatttataactaaggcgtaccggcaccatcgtttcaaggtaccagctacgagtaaagcaactggacgagatacagatacctgacaaccattcctcagaccaggaccaaaacgaaaaaagacgcttttcagcgtctcttttctggaatttggtaccgaggacgggacttgaacccgtaagccctattgggcactaccacctcaaggtagcgtgtctaccaattccaccacctcggcacggatactactttttagttcgggatatcgctggtcggcttagccggagcagctggctgagtttgttcggttttcgccggtgcactcagattttcccattcgctacctttattggttttgttgctattgatgttacccagcaccagactgatgatgaagaataacgttgccagcagcgccgtcatgcgggtcatgaagttaccagaaccactactaccaaacagcgtagcggaagcgcctgctccgaaggaggctcccatatcagcgcctttaccttgctgcagcatgatcagaccaacaaggccaattgccacaataaggaaaactactaaaagagcttcatacataatcaacctgttccttgcggagttgccgcgtaccaatgcttcaaccaataaagcgggagtttttaatctttcccactgaagcgggtgtgaatactaaccaaagcgaatgaccttcgcaagggcaattttatcgcattgtatcaactgcggaaaaaaacagcaaaaccgatgtgttcgctgagaaaaaaggcgacaatcgccgcctttttagccagttatctaacgctttaaacggcttttactgcatcggcgatgcggtgtgcaaattcagtcacctgcgcttcgtcttcgccttccaccatcacgcgaattaacggttcggtgccggatttacgcagcaacacgcgtccacggttgcccagcgcagcttcaacctctgcggtcacggctttaacactctcatgctcaagtggatcgccgctacctgcggtgtaacgtacgttaaccagaatctgcgggaacattttcatgccgctgcaaaggtcgtgcaggctcatatggttacgtgccatcgccgccagcacctgcaagccagcaacgatgccgtcaccggtagtagttttatccagcaggatcacatgaccggaattctctgcaccgatacgccagcctttctcctgcattttttccagtacgtagcggtcacccactttcgcgcgcgcaaatggaattcctaactgtttcagcgccagttcaagccccatgttgctcatcaatgtacccacagcgccaccacgcagctggccctgacgaagaccttcacgcgcgatgatatacatgatctgatcgccatcgactttattgccttcatggtcaaccataatcacgcgatcgccatcgccgtcgaaggcaataccgagatccgctttttcagccagcacacgagcctggagcgcgcgaacgtcggtagcccccacttcggcattgatgtttacaccgtttggctcacaaccgatagcgataacgttcgcccccagttcgcgcagcacgttcggcgcgatgtgataagtcgcaccgtttgcacaatccaccacaatcttcagttcactgaggctaagttcgttcgggaacgtggctttgcaaaactcgatatagcgacccgcggcatcaacgatacggctggctttacccagttctgcgctatcaacgcagctgatctccttttccatttccgcttcgatggcctcttctaccgcatccggcagtttggtgccgtcgatagagaagaatttaatgccattatcgtagaacgggttatggcttgcagatatcacaattccggcctctgcgcggaaggtacgcgtcagataagccacggccggtgttggcatcgggccagtgaagagtgcggaaaggcccgctgccgccagacccgcttccagtgcactctccagcatatagccagaaatacgcgtgtctttaccaataataatcttacgggagccgtggcgcgccagcactttacccgcggcccaacccagcttaagcacaaaatcaggtgtgatcggcgcatcccctacacgaccacgaatcccatcggtaccgaaatatttacgattactcatagcgtttgttttcctttgcagacagagtggcttccaccacccgcatcgcttctacggtttctttgacgtcatgaacacgaatgatgtgcgcgccttgcattgcggcaatgaccgcacaggccagactaccgctcaggcgctcggacggccccacgttcagcagctgcccaatcatgctttttcgactcatacccaccaacagcggcaggttgaaatggtgaaattcagccaggcgcgccagtaaactatagttatgggagagatttttaccgaaaccgaatccggggtcgagcaacaatttctcttttgcgatacccgcctgctcgcaacgtgctatttgctcaataaagtagcgattcacttctgcaaagacatcgtcatacttcggagcttcctgcatggtttttggatttccctgcatatgcatcagacaaaccggtaaaccggtttctgcagccgcctccagagcgccaggttcggaaagggagcggatatcattaataatgtgagcgccaactttcgcactctcacggatgacttctggtttggatgtatcgacactgatccagacttcgaagcgttgagcaattgcctcaaccacaggaataacacgttgcaactcttcttcaacgctaacttccgccgcccctgggcgcgtggactcgccaccaacgtcaatgatcgtcgcgccagcgttgatcatcagattcgcatgtttcaccgcatctatcaggctgttatgcgtgccaccatcgctaaaggaatcaggcgtgacgttgaggatccccattacgtgaggatggctaaggtccagactagtaccctgggcaaagagtttcatgatgttatccctggtatgaattgataagaaaaaaccccggagcacgccccggggttttcggtacaaatacagtcatctgatgcgggaacttacttgtcgcctaactgctcactcatggtgttacccgggttcggcgtacgcggttcatcaaccggacgaggagcctttggactaccattgtcgccagaattgttagaagcgcctggttcttcccagcccgctggcggacgtacatcgcgacgtgccatcaggtcatcaatctgcggtgcgtcgatagtctcatatttcatgagagcatctttcatcgcatgcagaatatccatattgtcggtcagaagctgacgcgcacgattatagttacgctcaatcagtgctttcacttcctggtcgatgatacgtgcagtttcatcggacatatgtttcgctttcgctacgctacggccgaggaacacttcaccttcttcttccgcgtacagcagtggacccaatttctcagagaagccccactgagtcaccatgttacgtgccaggttggtcgcaactttaatatcgttggacgcaccggtagatacatgttccggcccgtagatgatctcttctgccagacgaccaccgtacagcgtagaaatctggctttccagtttctgacggctggcgctgattgcgtcgccctcaggcaagaagaaagtcacacccagcgcacgaccgcgtgggataatcgtcactttgtgcaccggatcgtgttccggcaccaggcgaccgataatcgcatgacccgcttcgtggtaagccgtgctttctttctgcgcttccgtcatcaccatggagcgacgttccgcacccatcatgattttgtctttcgctttctcgaactcaaccatgctcacaacgcgtttgttgccacgagcagcgaacagtgccgcttcgttcaccaggttcgccaggtcagcaccggagaaaccaggagtaccacgggcaatgattgccgcgtcgatatcgggtgccaatggtacgcgacgcatgtgaactttcaggatctgctcacgaccgcgaacatctggcaagccgaccacaacctgacggtcgaaacggccaggacgcagcagggccgggtcgagaacgtccggacggttagtcgcggcgataacgatgataccttcgttaccttcgaagccatccatctcaaccagcatctggttcagagtctgttcacgttcatcgtgaccaccgcccagaccagcgccacgctggcggcctacggcgtcgatttcatcgataaagatgatgcacggtgccgctttcttcgcctgttcgaacatgtcacgaacacgggatgcacccacaccgacgaacatttctacgaagtcagaaccggagatagtaaagaacggaactttcgcttcgcctgcaatcgctttcgccagcagcgttttaccggtacccggaggaccgaccatcaagacgcctttcgggatcttaccgccgagtttctggaagcggctcggctcgcgcagatactcaaccagttcagcaacttcttcttttgcttcgtcgcagcccgcaacgtcagcaaaggtcgttttgatctgatcttccgtcagcatgcgcgctttgctcttaccaaagctcatggcacctttgccaccgccgccctgcatttgacgcatgaagaagatccagacaccaatcagcaacagcatcgggaaccaggagatgaagatagaagccagcaggcttggttcttcaggcggttcaccgacaaccttgacgttcttggtcaacaggttatccagtaatttcggatcctgaaccggaatgtaagtggtataacggttactatctttcttggtaacgttgatttcacgtccgttgatacgcgcttcacgaacctggtcgttattgacctcttgtaggaaggtagagtaatccaccttacggccattagactcgctgggcccaaagctctggaatacactcatcagcacaacggcaatgaccagccagagtattaggtttttcgccatgtcactcaagggattaacctcttattacaactgtgttaaaaacagcgtcaggatactctatatccagcatctttcaaactttcgtctgaaatctcccggttagggtttacgcccggtcgctacaatatacacttcccggctacgtgcacgagaagagtccagcttacgaactttgaccttcgtaaacagggagcgaatttcccttagatactcatcgaaaccttcgccctggaacaccttcactacaaaactgccacctggcgctaatacatcacgacacatttctagcgccagttccaccagatacatggcacgggggatatccaccgccggtgttccgctcatgtttggtgccatatcggacatgacaacctggactttgctgtcgccaacgcgctccagcagtgctttcatcaccagttcatcacgaaaatcgccctgaagaaagtccacaccaacgataggatccataggtaaaagatcgcaagcgatgatgcggcctttgccgccaatttgggtgaccacatattgactccaaccacccggagcagcaccaaggtcgacaaccgtcattcccggtttaaagagtttgtcactttgctgtatttcatcaagtttaaaccaggcacgggaacgtaacccctttttctgtgcctgttgaacatatttatcgctaaagtgttcctgaagccagcggctggagctggcagaacgcttcttacctgtcatttaactttcccatggggataactcatcgtaaccaattgcgtaaatttttacgcgcctatttggtgatatatgggagatggcggtagaatgacccgttttcaatcccaacgtaagcaaaaaatacgatgaatctgagtactaaacaaaaacagcacctgaaaggtctggcacatccgctcaagccagttgttctgcttggcagtaatggtttgaccgaaggggtgctggccgagattgaacaagcgttagagcaccatgaactcatcaaggtgaaaatcgccaccgaagatcgcgaaactaaaaccttgatcgtggaagctatcgtgcgcgaaaccggcgcctgtaatgtacaggtcatcggtaaaacgctggtgctttatcgcccaactaaagaacgtaaaatcagcctgccacgctaagattatcctaaagttacacacatttgctgtgtaaaacgaggggttttccgcaggcaggagagcaaaatgccacgctctgttcgttgataaaaggccgcatagcggcctttttcctttctttacaatacatcaacatcttgagtattgggtaattcttacaggtattccaccttaattacttcaaattctacttcgccgcccggcgttttgatgaccacaacatcatcttcttctttgccgatcaggccacgagcaatagggctgtttacagaaatcaggttttgtttaaagtcagcttcgtcatcgccaacgatgcgataagtctgttcttcgtcagaatccagattcagcaccgttacggtagcaccaaaaataacgcgcccattgttgggcattttggtgacatcaatcacctgcgcgttgctcagcttggcttcgatgtctttaatacggccttcgcagaaaccctgctgttcacgagctgcgtggtattcggcgttttctttcaggtcgccatgctcacgcgcttccgcgatagcagcaatgatttcaggacggcgcacagatttcagaaaatccagctcttcgcgtaatttttcagcgccgcgtaaggtcatcggaatagcttgcatttgttatacctcttgaatattcctgatagggcaagtcttcacccaccccggctgttcggcctgcccggcataactccttaccgggaccagaagcaaaaaaataccgacccgggtacaagtcccaggtcagctacaattcacattttgatagtcattttaccctgaagttcccgaagggtcatcgtttactttatagggcgttgcgccgtagtatgacggctcgattccaggttgttagcgcgagattatgcgattttccagatttatcatcggattgaccagctgtatagcgttcagtgttcaggccgcaaatgttgatgagtacattactcaactccccgctggtgccaaccttgccctgatggtgcaaaaagtcggcgcgagcgcccccgctattgattaccacagtcagcagatggcgctgcctgccagtacccagaaagtgattactgcgctggcggcgttgattcaactcggccccgattttcgttttaccacgacgcttgaaaccaaaggcaatgtggaaaacggcgtacttaagggtgacttagtggcgcgatttggtgccgatccgacgttaaaacgtcaggatattcgcaatatggtcgcgactttgaaaaaatctggcgtcaaccaaatcgatggcaatgtgttgatagatacctccattttcgccagccacgataaagcccccggctggccatggaatgacatgacacaatgctttagcgctccgcctgccgccgccatagttgaccgcaactgtttctccgtcagcctctacagtgccccaaagcctggtgatatggcttttatacgcgtggcatcttattaccccgttacgatgttcagccaggtacgcaccctcccccgtggttctgccgaagcgcaatactgcgaactggatgtggtgccaggcgacctgaaccgctttacgctgacgggatgcctgccacaacgttctgagccgctcccgttggcttttgccgtgcaggatggagccagctatgccggtgcaattctgaaagatgagttaaaacaggcgggtatcacctggagcggaacactgctgcgccagactcaggttaacgaacctggaacggtagttgccagtaaacagagcgccccgctgcacgatctgcttaagattatgctgaaaaagagcgacaacatgatcgccgatacggttttccgcatgataggccatgcgcgcttcaatgtgcctggaacatggcgggccgggagcgacgccgtgcgtcagatcctgcgccagcaagccggtgtcgatattggaaacaccattattgccgatggtagtgggcttagccggcataacctgattgcccccgccaccatgatgcaggtgctgcaatacattgcccaacacgacaatgaacttaactttatctccatgctgccgctggcgggctatgacggctctttgcagtaccgtgcaggtctgcatcaggcgggcgtggatggaaaagtcagtgcgaaaaccggtagcttgcagggggtatataacctggcgggattcattaccacagcgagcgggcaacgaatggcgtttgtgcaatatctttctggctatgcagtagaacctgcggatcagcgtaatcgccgtattccgttagtgcgttttgaaagccgtttgtataaagatatttatcagaacaattaatcaaaaagaaaccccggcacatggccggggcttcagattattgacaaagtgcgctttgtttatgccggatgcggcgtaaacgccttatccggcctacaaaatcgtgcaaattcaacatattgcaattctcttgtaggcctgataagcgtagcgcatcaggctgatttggcgtttatcatcagtgattaacgcttgtaaatgaactcaacgccttcttcgtcgtcttcgtcccagtcgtcatcccagtcttcatcatcctcttcagcaatctcttcaagctgctggcgatgataatcatcccacatgaattcgactttctctggctgtttcgcttcttcagcctgcacgaccgggttttcaatgataaaggtcatcacatcccagcagagatctttcacgcccagtccactcgccgcagagatcagataatatttatcttcccagcccagcgcctcagcgatcgctttcgctttctcttcggcttctaccttatccagcagatcgatcttgttgaacactaaccaacgcggtttcgtcgccagatcctggctgtatttttccagctcgctgataataatacgcgcgttttcaaccggatcggtgccgtcaatcggatcgatatcgatgaggtgcaacaggacgcggcaacgttccaggtgcttcaggaagcgaatgcccagacctgcgccttccgcagcgccttcaatcagtcctggaatatcggcaacaacgaagctcttttcgttgtccattcgtaccacacccagacttggcaccagagtggtaaacggataatccgccactttcggtttagccgcgcttaccgcacgaataaaggtgcttttacccgcgtttggcatccccaacataccgacgtcagccagcagcatcagctccagcagcagctcgcgcttatcgcccggcgtgccgttggttttctgccgcggtgtacggttaacggagcttttgaaacgggtattgcccagaccgtgccagccgcccttagcaaccagcagacgctgaccgtgtttggtcatatcgcccatggtttcaccagtaccctggtcgattacacgcgtacctaccggcactttaatcgtcacgtctttaccgcgcttaccggtacagtcgcggcttgcgccattctgaccgcgctctgcacggaaagatttttcaaaacgataatcgataagcgtgttcaggttctcgtcggcttccatccatacgtcaccaccatcaccgccgtcgccgccatccgggccgcctttcggaatatacttttcgcggcggaagctcacgcaaccattaccgccatcacctgcaacgaccagaatgcttgcttcatcaacaaacttcattttattctccgtaaatcattcgcctgcgcggggttggcttaccaccgttgtatgcttacgtaatccgccccaaatacgatgaccaatggcggaatacatcgcgcccgcaaccacgacaaacgcaccgagataacctaaaaggtttaacatcggtctggcgaagaaatcgggccaggccagacttaaaagatcactaaaaaacagcgtaaacagtggggtgagcgtgatgatcgcgctcacctgcgctgcctgccagcgagccatcgcttccgccagggcgccatatcctaccaaggtattcagtccgcaaaaaattaaacatgcgagctgccagtggctaagctgcgctatcactccaggctttgccagagggaagagcgcaattgtacataaagtgtacagtaaaaacaggatctgcggactggccagccgacgcaataaaaccttttgcgccacgccataactcacccaaaccgtcgccgcaccgaccccaaagataactccccaggtgtaatcggtgagctttgtaaatatctcgaccagactggtgttaaaaaacatcaccaggccgctcaggagcatcaatgcccctacaacctgagtgctgcgcattttctctttgaggataaatacgctggcaaccatcatgccaactgggctgagttgcccaatcacctggctagcggtcggactcaggtattgcaaggaactgctgaacaggatgaagttcccaaacagcccggcggtcgccactgccaacaaaatcaaccagcgtggcttacgaaacacgcgtaatggcggcaacctcttcttcaccgcaagaatggcacccaggccaatactcgccatcaagaaacggtaaaacacgattgtcggaggttccatcacctccagcacctgcttcattgcgattggcaacgccccccagcaaattgctgtggtgagcgccaaaagaatgccaatgcctgcctgctgcttcataccgtattccctgcaaagcgcatttgcggattaacgtcgcaccatgcgcatttttaccggttatcgaatgtaaaaagccccgcaacgtgttgcggggctttcatccgttaccgggacgcgaaaaacttattcagcttcgatgctgataaatttacggtttttcgggcctttaacttcgaatttcactttaccgtctgctttagcaaacagagtgtggtcacgaccgcaacctacgttagcgccagcgtggaatttggtaccacgttgacgaacgatgatgctacccgccagaacggattcgccaccgaaacgcttaacgcccaggcgtttagcttcactatcgcgaccgttacgtgtggagccgccagcctttttatgtgccatttgaaatctctcctcaggtcttaggcgctgatgccagtaattttcacatcagtgaaccactgacgatggccctgctgcttacgatagtgtttacgacgacgaaacttaacgattttaactttctcgccacgaccgtgagcaacaacttcagctttgattacgccgccatcaacgaaaggaacgccgattttgacttcttcaccgtttgcgatcatcagcacttcagcgaactcaacagtttcgccagttgcgatgtccagcttttccaggcgaacggtctgaccttcgcttactcggtgttgtttaccaccactttggaaaaccgcgtacatataaaactccgcttccgcgcacaccttttcaatgattcagagtgcgctataaatattcacaatagggcgcgaatattacgcaaaacgcacgcctttgacaagtgctacagtcaatacacgaagaaaaaaaacacaacttgtacggtaacgtttatctgtgccattttttcagtacaatcaccctatattcctaaccataaaccctaagttgcctttgttcacagtaaggtaatcggggcgaaaagcccggcttttgcgatgaatttagaaaaaatcaatgagttaaccgcgcaagatatggcgggtgttaatgcggcaatccttgagcagcttaattccgacgtccaactgatcaatcagttaggctattacatcgtcagcggcggcggtaaacgtattcgtccgatgattgctgtactggctgcacgagctgttggctatgagggaaatgcgcatgtcaccattgctgccctgatcgagtttatccacacggcgactctgctacacgacgacgttgtggatgaaagtgatatgcgcaggggtaaagctaccgccaacgccgcatttggcaatgccgccagcgtgctggtaggcgattttatttatacccgcgctttccagatgatgaccagcctcggtagcctcaaagtgctggaagtcatgagtgaagccgtaaacgtcatcgcagaaggtgaagttctgcaactgatgaacgttaacgatccggacatcactgaagaaaactacatgcgcgttatctatagcaaaaccgcgcgtctgtttgaggctgccgcgcagtgttccgggattctggctggctgtacgccggaggaggagaaaggcctgcaggattatgggcgctatctcggcactgctttccagttgatcgacgatttactcgattacaatgccgatggcgaacagttaggtaaaaatgtcggcgacgatctgaacgaaggtaaaccgacgctgccgctgctgcatgcgatgcatcatggcacaccagaacaggcacagatgatccgtaccgccatcgaacagggtaacggtcgccatcttctggaaccggttctggaagcaatgaacgcttgtggatctcttgaatggacgcgtcagcgtgccgaggaagaagcagacaaagccatcgcagcgttacaggtgctcccggacaccccttggcgagaagcactcatcggcctcgcgcacatcgctgttcaacgcgatcgttaatcccctcccctcatcccgcgcagcgcgcgggatggttccagtaagttccataaaaacacttattcagctctataacacctgaaaaatagggatgtgcatctttatatattctgaatattcacactctttacaggaactttttagagcaataggccatcaggagtatagtgatgctcgacagaagaagtgttctgaatgaaagcgactaacttaaggagtgaggaaaaatggaaagtaatttcattgactggcatcccgctgacatcattgcgggtttgcgcaagaagggaacgagtatggcggcggaatctcgcagaaatggtttgagttccagtacgctggcgaatgcattaagccgcccatggccgaaaggagagatgattattgcgaaagccctgggaactgacccctgggttatctggccaagtcgctaccatgatccgcagacccatgagtttatcgacagaacgcagttgatgcgtagctacactaaaccgaaaaaatgagtggtctggcggtagccccgcgaacggggctgccagctctcagacgattattcgcctttcacacgctcaatatttgcacctaaagcgcgcagtttgtcttcaatgcgttcgtagccacgatcgatgtgataaatacgatcaaccaccgtcgtcccttccgcaatacagccagccagcaccaggcttgcacttgcacgcagatcggttgccataacctgtgcgccagaaagtttttcaacaccgtgacaaataacggtattgctttcgatttcggcgtgcgcgcccatacggctcagctctggcacatgcataaagcggttttcaaagaccgtttcggtgataaacccggtcccttctgccaccaggttcaacagcgtgaactgggcctgcatatcggtcgggaatgccggatgcggcgcggtacgtacgttaacagccttcggacgtttgccatgcatatccaggctaatccagtcttcgccgacttcgatgtccgctccagcgtcacgcagtttcgccagcacggcgtcgagagtatctggctgcgcgttacggcagataattttgccgcgagaaatcgccgccgccaccaggaaagtaccggtttcgatacgatccggcagaacgcgatagacaccgccgcctaaacgttccacaccttcgatgacgatacgatcggtgccctgaccgctaattttcgcacccagcgtaatcaggaagttcgcggtatcgacgatttccggttcacgcgctgcgttttcaataatcgtggtgccttccgccagggttgcagcacacatgatggtcaccgttgcgccaacgctgactttatccatcacgatatgtgcacctttcaaacgaccatcgacggaagctttaacgtaaccttcttccagtttgatggtcgcgcctaattgttcgaggccagaaatgtgtagatcaaccggacgcgcaccgatcgtacaaccgccaggtagactaacttgcccctgaccaaagcgcgctaccagcggccccagcgcccagatagaagcacgcatggttttaaccagatcgtaaggtgcgcagaatacattaacgtcgcgggcatcaatatgcacagaaccattacgttctactttcgcacccagctggcttagcagcttcatacttgtatcgacgtctttcagtttcgggacgttctggatctctaccggttcttccgccagtagtgcggcaaaaaggataggcagagcagcatttttagcgccggaaattgtgacttcgccctggagcttcgttggcccctgaacacgaaatttatccatttagtttgttctcagttaacaattcatatccgctaccggcgaatcgcccatagctcaaaagccgttcagtttgcgatcgcgcgcccactccgcaggggtatacgctttgatgctcacagcatgaatgcggttatccgcaatatattccatcagcggaccatagaccgtctgctgttttttaacccgactcatgccgtcaaacaactcacccacggcaataacctgaaagtggctgccatcgccggaaacgtggacttcctggagggagagagcgttcatcaacacgctctgaatttcattattttccatgggatcttcaatcatcagttaataaaccagcgaaacatcttagagcaaagttgcgctggcataaataagcaaaaagcctcgctgataaatcagacaaggctcgacttgcaggcaggtttgccggacaggcggttaacgccatatccggcctgaaaaaatttaacgaggcagaacatcagcaggcaaattatacaatttcgccagggtatacactttgtcgtttaccccctgaagcgtcacattgttgccctgctttttcgccagatcgataagatggagcagcagtgccagtccccccgtatccacgcgggagacacggctaagatcgatgcaggtaatccccttcaccgcttcctcacgcatttcccaaagcggtagcaaaacgtcctgatccagctctccggataacgccagcgtgtcacccgtctgcatccagctcagactctcgctcattattttttctcttccagagtgattttctgttgagaaatgcttttcagttgcgcagtcaggccgtcgatacctttggtacgcagcagcgttccccactcgttttgtttggtggtgatcatactgacgccttcagcaatcatgtcgtaagcctgccaattgcccgtctgggagtttttacgccactggaagtccagacgcaccggcggacggccattcgggtcaataatggtaacgcgaataggcacaatggttttatcgcccagcggctgttctggcgcaatctgataggtttgaccgtgatacatcgccagcgcctgaccgtaagcctgcttcaggtactcacggaaagcggcaaagtaggcttcacgttgagcaggggtcgcactcttgtaatactggcccagcaccagcgcaccggcgtatttcacctgtacgtatggcagcagttcctgatcaacaatggtacgcagataatccgggttggcccgaatttgcggttgctcattcttcaggcgatcgaacgttttctgcgccgcctcgtccatcagcttatacggattggtctggtctgccgcggttgccgcactcagaggtgcaatcaccagcaaagcgaccatcattaaacgtttaaacatgcgtcggttctcctgaaattatttcgttgtacccacaggttcagtggtttcattattacctggcgcagcagctggcgcatcgccactattcttattgtcatcgcctttactaccgtaaaggaactgaccaatgagatcttccagcaccatcgcagacttagtgtcctgaattgtatcgccatccttcaggatagcagtccccagttccgggtcttcaaaaccgacgtttaatgccagatattgttcccccagcaggccggaagtacgaatgctcaggctactggtatctggaatgtggttataacgttgttcaatttccagcgttacgcgcggcagataggttttcgggtccagcgtaatatccgccacccgacccacaacaacgccaccaatactgaccggagagcgcgctttcaggccgccaatgttatcgaacgtcgcataaagcgtgtaggtcggttcagtacgtatggacgtcacgttcgccgccttcaggcaaacaaacagcgccgccagcagtgctgctaataaaaagatacccacccaaatttcattttttttcgtttgcatgaactcaattcccaaacatcaatgcggtcagcacaaaatccagccccagaacagccagagagctgtggacaacggtgcgagtggttgcccggctaatcccggcagacgtcgggatggcgtcgtagccgttaaacaagctaatccacgtcaccgtgatggcgaacaccacgctcttaatcagacagttgaccagatccatacgccagtcgacggcattttgcattgcgctccagaagaacccgctatcaatgcctttccaactgacgccgaccagagatccgccccagatccccacggcgacgaaaataaccgtcaacagtggtaaactaataaccccagcccagaaacggggagaaataacccgacgcagcggatccaccgccatcatctccatactggagagttgctctgtagcgcgcatcaggccgatttctgcggttagcgcgctaccagcacgcccggcaaacaacaacgcggcaaccaccggccccagttcacgcagtaggcttaacgccaccagcatacccagactggtttccgcactataagtggtcagaaccagataaccttgcagccccaacaccattccgatgaacacgccagaaaccacaataatcagcatgctcaggacgccgacattatagagctggcgcaccagcagcggcgcatgtttgcgaaattccggtttgccgaccagcgcattgaataacattaacccggcccgcccgaacgttctcagggttttaatccctttatgtccgaggctcgccagcgcatttaacagcatgagtggcttaactccctggtaaaagatcagcgtgataatcgccggcaggatagcggaacggaacaggcccgtcagctatcccgtccagaaactgacgtacgcgcggatcaggattcgcctgcaacgcctgggcactgccatgagcgacaatttttttgtccgccaggatccaggcgtgatccgcaatacttaacacttccggcacatcgtgagaaaccaccacacaagtcacgcccagcgcgctgttcagctcagaaatcagcttcaccagtacgcccatggtgatgggatcttgcccaacaaaaggttcatcaaacatgatgagatccggctccagcgcaatcgcacgcgccagcgctgcacgccgcgccatcccaccggaaagttcagaaggcattagtttagccgctccacgcagccccacggcctccagcttcatcatcaccgtactatgcaacaatggcgcgggaagttgggtatgttcgcgcagtggataggcgacgttgtcaaatacgttcatatcagtgaacaacgccccggactgaaataacatgctcatccgtttgcgcactgtatacaggcggctacgagacatcgccggaatattctcaccatcgaaaaggatctcaccatgatctggtgcgatttgcccgccaatcagacggagtagcgtcgttttaccgatgccgcttggccccatgatcgccgtgatcttccctcgcggcacggtcagggaaatattatcgaagatgcagcgattgccacgcgtaaaactgacatcgcgcatatcgactaaattcgccacagactgctccataattcacccttcgtcttgcgttgattttctaagcatggcgctcaatttaaccttgaacccaacatatttacagaatattacccgccgtggttagcgaaagctggcatttgttttactttttagccgcataaagtcaaaattaagcatccgttacggctttctgaaaatcttcagcggaccggcgagtatacctgaagaaaggacgttagatgcttttagctacggcactgttaattgttggtttacttttggtcgtttacagtgccgaccgcctggtttttgccgcgtctattctttgccgaacctttggcatcccgccgctgatcatcggcatgacggtggtcagtattggtacaagcttaccagaagtcatcgtcagccttgccgcgtctctgcacgaacaacgcgatttagccgttggtacagccctcggcagtaacattatcaatatattgctgatcctcggtctggctgcgctggttcgtccttttaccgtccattctgatgttctacgccgtgaattacccttaatgttgttggtcagcgtggtggccggttccgtactctatgacggacaacttagtcgcagcgatggtatctttctcctctttctggctgtgctatggctgctgttcattgttaaacttgcacgtcaggctgaacgtcaggggactgacagcctgaccagagagcagcttgcagagctgccgcgtgacggcggattgcccgtcgcgtttttatggctcggcattgcgcttatcatcatgccagtggccacgcggatggtggttgataacgccacggtgctggcgaattactttgccatcagcgagttgacgatgggtctgacggcaattgctatcggaaccagcctgccggaactggcaaccgcaatagcgggggttcgcaaaggtgaaaacgacattgctgtcggaaatatcattggcgcaaacatttttaatattgtcatcgtgttgggtttacccgcgctgataacgccaggagagattgatccactggcgtacagtcgtgactacagcgtgatgttgctggtgagcattatttttgcgttgctgtgctggcggcgctccccgcaaccgggccgtggtgtaggggtattattaactggcggatttatcgtatggctggcgatgttgtactggttaagcccaatactcgttgaataactggaaacgcattatgagccacgtagagttacaaccgggttttgactttcagcaagcaggtaaagaagtcctggcgattgaacgtgaatgcctggcggagcttgatcaatacatcaatcagaatttcacgcttgcctgtgaaaagatgttctggtgtaaagggaaagttgtcgtcatggggatgggaaaaagcgggcatattgggcgaaaaatggcggcaacgtttgccagcaccggtacacctagttttttcgtccatcctggtgaagccgcgcatggtgatttaggcatggttaccccacaggatgtggtgattgctatctctaactctggtgaatccagcgaaatcacggccttaattccagtgcttaagcgtcttcacgtaccgttaatctgcatcaccggtcgcccggagagcagcatggcgcgcgccgcagatgtgcatctgtgtgttaaagtagcgaaagaagcctgtccgttagggctggcaccgaccagcagcaccaccgccacgctggttatgggcgatgccctcgctgtcgcgctgttaaaagcacgcggctttactgctgaagattttgcgctcagtcacccaggcggcgcactgggtcgtaaacttctgctgcgcgtaaacgatattatgcatacgggcgatgagatcccgcatgttaagaaaacggccagtctgcgtgacgcgttgctggaagttacccgcaaaaatcttggtatgactgtcatttgcgatgacaatatgatgattgaaggcatctttaccgacggtgatttacgccgtgtcttcgatatgggcgtggatgttcgtcagttaagtattgccgatgtgatgacgccggggggaatacgtgtgcgccctggcattctggccgttgaggcactgaacttaatgcagtcccgccatatcacctccgtgatggttgccgatggcgaccatttactcggtgtgttacatatgcatgatttactgcgtgcaggcgtagtgtaaagattcaaggataaacaacaatgagcaaagcaggtgcgagccttgcgacctgttacggccctgtcagcgccgacgttatagcaaaagcagagaacattcgtctgctgatcctcgatgtcgatggcgtactgagtgatggcctgatttatatgggcaataatggcgaagagctgaaagcgttcaatgttcgtgacggttatggcattcgttgtgcgctcacctctgatattgaagtcgctatcattaccgggcgaaaggctaaactggtagaagatcgttgtgccacattggggatcactcacttgtatcaggggcagagtaacaaactgatcgcctttagcgatctgctggaaaaactggcgattgccccggaaaatgtggcttatgtcggcgatgatctcatcgactggccggtaatggaaaaagtgggtttaagcgtcgccgtggccgatgcgcatccactgttgatcccgcgcgccgattacgtgacgcgcattgctggcggtcgtggcgcagtgcgcgaagtttgcgacttattactcctggcgcagggcaaactggatgaagccaaagggcaaagcatatgagtaaagccagacgttgggttatcattgtgctaagtctggcggttctggtgatgatcggcattaatatggccgaaaaagacgataccgcccaggtggtcgtcaacaacaatgatcccacctataaaagcgagcatacggacacgctcgtctataacccagaaggggcactaagctatcgattgattgctcaacacgttgaatattattccgatcaggccgttagctggtttacgcagccggtacttaccacgtttgataaggataaaatcccgacatggtccgtaaaagcagataaagccaagctgaccaatgaccggatgctctatttatatggacacgttgaagtcaacgcacttgtgccagactctcaacttcgcagaatcacgacggataacgcgcagatcaatctggtgacgcaggatgttacctctgaagacctcgtcacgttatacggaacaacatttaactccagcggtctgaaaatgcgcggcaacttacgcagcaagaacgccgagctgattgaaaaggttagaacatcctatgaaattcaaaacaaacaaactcagccttaatcttgtgcttgccagcagtcttctggccgccagcattccggcatttgccgtaaccggagacactgatcagccgatccacattgaaagcgaccagcaatctcttgatatgcaaggcaacgtggttacctttaccggtaatgtcatcgtcacccagggcaccatcaaaattaatgccgacaaagtggtcgttacccgtccgggcggcgaacaaggtaaagaagtgattgacggctacggtaaaccggcaacgttctaccagatgcaggacaacggtaaacccgttgaaggtcacgcttcccagatgcactacgaactggcaaaagattttgtcgttctgacgggtaatgcttatctgcagcaggtcgatagcaacattaagggcgataagatcacttacctggtgaaagagcagaaaatgcaggctttcagcgacaaaggcaagcgcgtaacaaccgttctggtgccgagccagctgcaggacaaaaacaacaaaggccagaccccggcacagaagaagggtaattaattcgttatggcaacattaactgcaaagaaccttgcaaaagcctataaaggccgtcgcgtggtagaagacgtcagcctgaccgtcaactccggggaaattgtcggtctgctggggccaaacggtgccggtaagaccaccactttctacatggttgtaggcattgtgccgcgcgatgcgggcaacatcattattgatgatgacgatatcagtctgctgcctctgcatgcacgcgcgcgccgcggtatcggctatctgccacaggaagcctccattttccgtcgcctcagcgtttacgataacctgatggcggtactgcaaattcgtgacgacttgtctgctgaacaacgtgaagaccgcgcgaacgagctgatggaagagtttcacattgagcacctgcgtgacagcatggggcagagtctctccgggggtgaacgtcgccgtgtagaaattgcccgcgcactggctgcgaatccgaaatttattctgctcgacgaaccgtttgccggggttgacccgatcagcgttatcgacattaaacgcatcattgagcacctgcgcgacagcggcctgggcgtgctgatcactgaccacaacgtgcgtgaaacactggcggtttgtgaacgcgcttatatcgtcagtcaggggcatttgatcgcccacggcacgcctacagaaatcttacaagacgaacacgttaagcgtgtataccttggggaagacttcagactctgatagggtagaagtttgcgacgttttagcaggagagtacgattctgaacatgaagcaaggtttgcaactcaggcttagccaacaactggcgatgacgccacagctccaacaggcaattcgtctgttgcagttgagcacgctggaacttcagcaggagctacagcaggcgctggagagtaatccgctgcttgagcaaatcgacactcatgaagaaatcgacacccgcgaaacgcaagacagtgaaacgctggacaccgccgacgcgctcgaacaaaaagagatgccggaagagctgccgctcgatgccagttgggacaccatttacaccgctggtacaccatccggcaccagcggtgactacattgacgacgagctgccggtctaccagggcgaaacgacgcagaccttgcaggattacctgatgtggcaggttgagctgacaccgttttccgacactgaccgcgctattgctacctctatcgtcgatgccgttgatgaaaccggttatctgactgtcccgctggaagatattctcgaaagtataggcgatgaagagatcgacatcgacgaagttgaagccgtccttaagcggatccaacggtttgatccggtcggtgtggcggcaaaagatctgcgtgactgtctgctgatccaactctcccaattcgataagaccacgccgtggctggaagaggccagactgatcattagcgatcatctcgatctgttagccaatcacgacttccgcactttaatgcgcgtcacgcgtctgaaagaagatgtgctgaaagaagccgtcaatctgatccagagcctcgatccgcgccccgggcagagcatccagactggcgaacctgagtatgtcattccagatgtgctggtgcgtaagcataacggtcactggacggtagaactcaacagtgacagcattccgcgtctgcaaatcaaccagcactacgccagcatgtgcaataacgcgcgcaacgatggtgacagccagtttatccgcagcaatctgcaggatgccaaatggttgatcaagagtctggaaagccgtaacgatacgctactgcgcgtgagtcgctgtatcgttgaacagcagcaagccttctttgagcaaggtgaagaatatatgaaaccgatggtactggccgatatcgcccaggctgtcgaaatgcatgaaagcacgatatctcgcgtgaccacgcaaaaatacctgcatagtccacgaggcatttttgaactgaagtatttcttttccagtcacgtcaataccgagggcggcggcgaagcttcctccacggcgattcgtgcgctggtgaagaaattaatcgcggcggaaaacccagcgaaaccgttgagcgacagcaagttaacctctttgctgagcgaacaaggtatcatggtggcacgccgcactgttgcgaagtaccgagagtctttatccattccgccgagtaaccagcgtaaacaactcgtttgacccaaccgataaggaagacactatgcagctcaacattaccggaaataacgtcgagatcaccgaggcactgcgcgaatttgttacagccaaatttgccaaacttgagcaatattttgaccgaatcaaccaggtctatgttgttctgaaagtggagaaagtcacccacaccagtgatgcaacactgcatgtaaacggtggtgaaattcatgccagcgcggaaggtcaggacatgtacgctgccattgatggcttaattgataagctggcacgccagttgaccaaacataaagataaactgaaacaacactaattgtccgggcaattagcatgtgcatggcggtctgttgtgcggcacaacgggccatttgtacggttaatgctccgagcctgttccactgtttgagtgggcaggttcttaggtgaaattatgacaaataatgatacaactctacagcttagcagtgttcttaacagggaatgtacgcgaagccgcgtccactgtcagagcaaaaaacgcgccctggaaatcatcagcgagctggcggcgaaacaacttagcctgccgcctcaggtggtttttgaagctatcctgacgcgggaaaaaatgggcagtaccggtatcggcaatggtattgccattccgcatggcaaactggaagaagatactctgcgcgccgttggcgttttcgttcagctcgaaacgcctatagctttcgatgccatcgacaaccaaccggtggacttactttttgccctgctggtgccggcagaccaaactaaaacgcacctgcatactctgagcctggtggcgaaacgtctggcggacaaaaccatctgccgccgtttacgcgcagcccagagcgatgaagagctgtatcaaatcattacggataccgaaggtactccggatgaagcgtaattattcggtaatgtctcttttagacgttgtgaggagaaacagtacatggtactgatgatcgtcagcggacgtagtggtagtggtaaatctgtcgccctgcgtgcgctggaagatatgggtttttactgcgtggataaccttcccgtagtgttgttacccgatctggctcgaaccctggccgatcgcgagatttctgccgccgtcagcattgatgttcgtaatatgccggagagtccagaaatattcgaacaggcgatgagtaacctgcctgacgctttcagtccgcaactcctgttcctggatgccgaccgtaataccttaattcgtcgttacagtgacacgcgccgactgcatccgctttccagcaaaaacctgagcctggaaagtgctatcgacaaagaaagcgatttgctggagcctctgcgtagccgagcggatctgattgtcgataccagtgaaatgtccgttcacgagctggctgaaatgctgcgtacccgtctgctgggtaaacgtgaacgcgaactgaccatggtctttgagtctttcggcttcaaacacggtatccctatcgatgcagattacgtctttgacgtgcgcttcttgccgaacccgcactgggatccgaaactgcgtccaatgacaggtcttgataaacctgtcgccgcgttcctcgaccgccacacagaagtacacaattttatctaccagacgcgaagctatcttgagctatggttacctatgctggaaaccaacaaccgtagctacttgacggtcgccattggttgtaccggcgggaagcaccgtagcgtgtatattgcagagcaactggcagactacttccgcagccgcggtaaaaacgtccagagtcgccatcgtacgctggaaaaacgtaaaccatgaccgtcaagcaaactgttgaaatcacaaacaagctgggcatgcatgcccggcctgcaatgaagctgtttgaattaatgcagggttttgacgctgaagtgctcttacgtaatgacgaaggcaccgaggctgaagccaacagcgttattgcgctgctgatgttggattctgccaaaggacggcagattgaagttgaagcgaccggtccacaggaagaggaagcactggccgccgttatcgccctctttaattctggttttgatgaagattaatcttcatcactttgacatacaactcccttcaaactccccccgacaataagaaaatcacgtactgaaatcgttctcaatcaacgtcatttgtacattttgtgcgcttttcactttcagaagaaccttaagaaaaccttaagaggcattgtttaggttttgtttaagttaatcgaccatactggagatcgtcagaaaatatttccaggagatggcatgattcgcttatctgaacaaagtcccctgggcaccggaagacatcggaaatgttatgcgcatccggaagatgcccaacgctgtatcaagattgtctaccatcgtggcgatggtggcgataaagagatccgccgtgagttaaagtactacgcgcatcttggtcgccggttaaaagactggagtggaataccgcgctatcacggtaccgttgagacggattgcggaaccggttatgtctacgatgtgattgcagattttgacggcaagccttccattacgctgaccgaatttgctgaacaatgccgttacgaagaagacattgcacaactgcgccagctactgaaacagctgaagcgttatttgcaggataaccgtatcgtgacgatgagcctgaagccgcagaatatcctctgtcaccgcatcagtgagagtgaggttatcccggtcgtctgcgacaacattggtgaaagcacattgattccactggcgacctggagcaagtggtgttgtctgcgtaagcaagagcggttatggaaacgatttatcgcccaaccggcgctggctattgccctgcagaaagatctgcaacctcgtgagagcaaaacgctggccctcactagccgcgaagcttaatccagctggtgttgttgcataaacggctcaccgcctaactgatacatctgccgtaaaatccacgcctgacggctacgcacgtagccgcttgggctggagactttgaaacgaagtggattaggtaatacagctgccagtaatgcagcttcgctccgggtaagtttgctcgcgggtttgtggaaataacgttgtgccgcagcttcgacgccaaacacaccgtcgccaaattcggcgatattcaggtaaaccgtcaggatacgctttttgctccagaccgtttctatccccagcgttaatccggcttccagcccttttcgaacccagctacgcccatcccataaaaagagatttttggctgtctgttgagaaatcgtactagcaccgcgaatacggttttcattgcgctcgttgtgcgccagggctttctcaatggaagcgacatcaaagccccagtgctcaggaaatttctgatcttctgcggcaatcaccgccagtcccatccacgggctgatttgatccatactgacccagtcagaatgtgccacgtaacgaaaattgccatgcagccaggcgctgacctgtcgctcgaccattaccgcactgaagggaacaggcgcaacgctaaacaacgcgatgcccccgccccagaaaacggcgaggacaaccattaaccgcaaaagaaaacggcgaacgaaactaaacaccgttaagcggcttttactcattcagccagaaccagcacgcgggaaaccagcttatcaatgccgctcgccgcttctgcaatgttctgcgccagcatatatgctggggtggtgacaatcttattgtcttcatcaaccacgatatcatcgacaggacacggcacatgctccgcgcccatctcttccagcacttctgcggtatcgatatcagtaccgatggtcaaacgcagcgggaaatcgaaaattttcggcagcatcgccggggcaatacacataaaaccaagcggttttccggcctgatgcatcgcttgtgccagcgcctttaattcacggtcaacggtgcattcgctaccaagactggcaaaattgcttaaattcttcgccgcgccaaacccccccggcacaatcaacgcatccagttcagcggcatcggcctgggccagaggacggatttcaccgcgcgttattcgtgccgcttcaatcagcacattgcgcgtttccgtcatcgcttcgccagttaaatggttgataacatcaacctgctgcttatccggtgcaaagcagaccgcctgcgcaccgctgcgactaatagctaacaacgtcaacaccgcttcatgaatttcagaaccgtcatagacgccgcatccgctcagaattacgccaattttcttcattgtgatcatcctttcgcaattgactgaaacacattaatttttttaataaaaatggtacgcatcacacatttaactgattcatgtaacaaatcatttaagttttgctatcttaactgcgtgcggcctgaaaaacagtgctgtgcccttgtaactcatcataataatttacggcgcagccaagatttccctggtgttggcgcagtattcgcgcaccccggtctagccggggtcattttttagtggcttttgccacccacgctttcagcacttctacgtcgtgacgccactcttctttcatctcttcaatccattcaccgacgttatcttcccaggccggaaggtcaggagactgaatttgctgacccagctgttgcagatggcgtaaccccacactccccgccgcacctttaattttatgtccttcctcaacaatgccttttttatcctgcgccgtcagattgctctccagcacgctgacatagcccggcatcatcttctcaaacaccgctaacccgtcggtgatcagcttcggtcctacaagttcgagatactgttccagcatgggaatatcgagcaatgcttcacttttactgttctcttctgtcgtcaccgtactctcctcatcatcctgggtatcccagaatttcttgatcatcgcggttagcgccggaacagaaagcggcttactcagcacatcatccattccagcattgaggtactcttgtttgtctttcagcacgttagcggttaaggccaccagcggcggtaaatcctcgcgcggataacgtttcgtcagttcacgagagatatccagcccggtcatatctggcaactgaatatccagcaacaccaggtcgtattcgcccggtttaaacatctccagcgccgccttgccggtcatggcgacatcaacgctgttacctaatttttccagcacagaacgcgcaacaatcacgttcagttcaatgtcttccaccagcagcacattcagcgccggtaaaggcatatcgtcttcatcaaacgcatcatcgacctcttctgctacgctcggtgcgtggatcgtcaacgtaaaggtactacctttgccctgttcgctggtaaccgtaatatcgccgcccatatttttcgccagacgacgagaaacggccagaccaataccggtgccggtggcaggtttaccgccatgactgtctttcacctggtaatacatggcgaaaattttatccagctcatcctgcggaatgccgataccagagtcttccacttcaaaatgcagcatatcgccttcatcgtagcgcacgcgcacggtaacctggccttgctgggtgaatttgacggcgttactgatgaggttccacaggatctgccgtaaacgcgtcccgtcggtaatgacctgatgcggtaatggcagcgtcggctccaggttaaagcgcaatcctttttgttgcgcctgcaatgcggagagattttccagatcggcaaggaagctggtgaaatcaaccggttgattatcaagctggaccttgcgccgttccatcttatccatgtcgataatatcgttaaagatattccccagcgtgacggcgctaacatggatggtcttgagatatttttcctgctcggcggtgagttcggtatccagcagaatgcggctcagaccgacgataccgttcagcggtgtacgcaattcgtgactgatggtggagataaacgtcgttttgtcgcggctggcccgttcaagcgcatcctgataccgcttacgctcggtaatgtcgcgaccaaagcccatcaaaccgtgacgtttacccacgcggtcgtagtacggcactttacggatttcaaagcaggctttgcgcccgtccgggtaatccagccactgttcataggtcagactcacattatgacggaacactttttcatcggtttcaatgacttttgcggcggcttccggactgtaaacatcagcaggtttcaggtgaaccagttgtttttcgctttttccggtcagcagctccatcgcgcggttacagccggaaaactctttatcttcgttacgataaaaaaccaggtcgggactagcatcaaggaaggaacgtaagaaactggattgctgctcgagctgaatttgtgtctcttcgcgctctttgatttcaattttcagttggccgaaggtttcctgcagttctgcttccgctttttcacgaacggcaatttcctgatttagctgggcaatattatcttttaactgaacgttgaggctcaaatcgcgctcgcgcatctcctccagtttttgcaccagccgactcagacgttgtcgactctcctccagttgctcgacgaccacgcttagaaagtagaccgcccacggcgtaatcagcaaaccaaagaagatagaacgaataacatcaatgctttcgacctgaccatgcagcaccatggttaccgccatttgtaccacaatggcaagaacgacgagggccagcgccagcaacatactgaagcgcaccagacctaacttcatcatcaggtcaacataatactgcgccagcagacgaatttgcttcattagggaattccttcacgacaacctgccccaataatacccaattctgacagttacgttataaattgtgtgagaaatgcggaattcccctcaacgacttactccgttggaggtagccacggacgtcccagcgcgcttccctgtacgccatgttcattcagatagcgatccagctcgaccattcccgtccatcgattttcgcaccacagcggagcaagcagcgtcgggcgacgggcgctggcggaaatgcggtggtagatcacttccggtggcgtatggcgaatcatttctccggcagtgagcgtgtaatcctccagttcaataccgttcaaacgccccgcttcccaggctttcgccataatgctgcctttcacaatatgcagcggatgcagctttatgccgtccacgccggtttcaaccactcgctccagcgtttgcaaacattcagcctgcccttcgccaggcaggccgacaattaagtgggaacacaccttcagcccgcgctgacgtgccagctgggttgtacgctgataacaggcaaaatcatggccgcggttgatgcgatgcagtgttttgtcgtgggcggtttgtagccccagctccagccacacttcgtaaccctggtccttatattcgcaaagcagatccagcaccgcatccggcacgcagtccgggcgggtacccacacacaaaccgacaatattggcctggctcaccgcctgctgatacatagaacgcagcacctgaacttccgcaaaggtgctggtatacgcctgaaagtaggccagatagcgtttagcgcggttaactaaattcgcctggtgcgccagttgctcggcaatggaacgatgctgctgcgcttcatcggcaaagctggcaacattacagaatgtgcagccaccacgcccgatggtaccgtcacggttagggcagctaaaaccgccgtgcagcgtcagcttatgcaccttttgcccataacgacgggtgagatcaccaccaaacatattgactaatttctgtaactgcataatctgatagaccgcgccttgaaaagaggccaaagcctgccatttttagctcaattcggcgatgacctggatcaatcgtcccggcctgcttttatcaactgcataatcaatcaaaattaccgaaatttcatgcataatcacataaatcacttttgcttatcttgtgtcagatttttttatctcctgatggattttaggcaaaaacagtagcatgaaacgtcattaccaattaaggcagtataaaatgctggttttgtcgtcagttcaaggcaggataagggttaacacacctttatgacagtcaggaattgactgtttctctaacgacttcccttttagccttaaagataaaatccattttaatttcagtcatttaataaagaattttgcgctaaagcacatttctgtaccaataagcttgccatttgacctgtatcagctttcccgataagttggaaatccgctggaagctttctggatgagcagcctgctcatcatatttatgcagtaattgagatcccctcttcaccgtattaaccgatgcgaaaaggacaacaagggggcgaatgcgaggcgcgcgtatgacacgcaaaccccgtcgccacgctctttctgtgcccgtgcgcagcggtagcgaagtggggttcccgcagagcctgggggaggttcacgatatgttgtacgataaatcccttgagagggataactgtggtttcggcctgatcgcccacatagaaggcgaacctagccacaaggtagtgcgtactgcaatacacgcactggcccgcatgcagcaccgtggcgcgattctcgccgatggtaaaaccggcgacggttgcggcttgctgttacaaaaaccggatcgcttttttcgcatcgttgcgcaggagcgcggctggcgtttagcaaaaaactacgctgtcgggatgctcttcctgaataaagatcctgaactcgccgctgccgcacgccgcatcgttgaagaagaactgcaacgcgaaaccttgagcattgtgggctggcgtgatgtccccactaacgaaggcgtgctgggtgaaatcgccctctcctctctgccacgcattgagcaaatttttgtgaacgccccggcaggctggcgtccacgcgatatggagcgccgtctgtttatcgcccgccgccgcattgaaaagcgtctcgaagccgacaaagacttctacgtctgtagcctgagcaatctggtgaacatctataaaggtctgtgtatgccgacggatctgccgcgcttttatctggatcttgcggacctgcgtctggaaagcgccatttgcctgttccaccagcgcttctccactaacaccgtaccgcgctggccgctggcgcaaccgttccgctatctggcgcataacggtgaaatcaacaccatcaccggtaaccgccaatgggcgcgtgcgcgtacttataaattccagacaccgcttatccctgacctgcacgacgccgcaccgttcgtcaacgaaaccggctctgactccagtagcatggataacatgctggaactgctgctggcaggcgggatggatatcatccgcgccatgcgtctattagtaccacccgcctggcagaacaacccggatatggacccggaactgcgtgccttctttgactttaactccatgcatatggagccgtgggatggcccggcgggcatcgtgatgtccgacggtcgttttgccgcctgtaacctcgaccgtaacggtctgcgtccggcgcgctacgtcatcaccaaagataagctcatcacctgcgcctctgaagtcggtatctgggattaccagcctgacgaagtggtcgaaaaaggccgcgtcgggccaggcgaactgatggttatcgacacccgcagtgggcgtattctgcacagcgcagaaaccgatgacgatctgaaaagccgccatccatataaagagtggatggagaaaaacgtccgccgactggtaccgtttgaagatctgcccgatgaagaagtgggtagccgcgaactggacgacgacacgcttgccagctaccagaaacagtttaactacagcgcggaagagctggactccgtaattcgcgtactgggcgaaaacggtcaggaagcggtcggtagcatgggcgatgataccccattcgccgtgctctccagtcagccgcgcattatttacgactacttccgccagcagtttgcccaggtgactaacccgccaatcgacccgctgcgtgaagcgcatgttatgagcctcgccaccagtatcggtcgtgaaatgaacgtcttttgcgaagcagagggccaggcgcaccgtttaagctttaaaagcccgattctgctctactccgatttcaaacagctcacgacgatgaaagaggagcactaccgcgcagatacgctggatatcacctttgacgtcactaaaaccacgctcgaagcgacagtcaaagagctgtgcgacaaagccgaaaaaatggtacgtagcggcaccgtgctgctggtgctctccgaccggaatatcgctaaagatcgcctgccggttccagccccgatggcggttggcgcgatccagacccgtctggtcgatcaaagcctgcgttgcgatgccaacatcatcgtcgaaaccgccagcgcccgcgatccgcaccacttcgccgtgttgctgggcttcggcgcgacggctatttatccataccttgcctatgaaacgctgggccgcctggtagacacccatgcgattgccaaagattatcgtaccgtgatgctcaactaccgtaacggcatcaacaaaggcttgtacaaaatcatgtccaaaatgggcatctccaccatcgcctcttaccgctgcagcaaactgtttgaagcggtcggtctacacgatgatgtagtgggcctgtgcttccagggggcggtcagccgcattggtggagcaagctttgaagacttccagcaggatctgctgaatctgagcaaacgtgcctggctggcgcgtaagcccatcagccagggcggtctgctgaaatacgtccacggcggcgaataccacgcctacaacccggacgtggtgcgcacgctgcaacaagcggtacaaagcggcgagtacagcgactatcaggaatacgcgaagctggttaatgagcgtccggcaaccacgctgcgcgatctgctggcaattacgccgggtgaaaacgcggtcaacattgctgatgttgaaccggcaagcgaactgtttaaacgctttgataccgccgcgatgtctatcggcgcgttaagcccggaagcccacgaggcgctggcggaagcgatgaacagcatcggcggtaatagcaactccggtgaaggcggcgaagacccggcgcgctacggcaccaacaaagtgagccgcatcaagcaggtggcttccggtcgctttggggttactccggcgtatctggtcaatgccgacgtcattcagattaaagtcgcccagggcgcgaagccaggcgaaggcggtcagttgccgggtgataaagtcacgccttacatcgccaaactgcgctatagcgtgcccggagtgacgctgatctccccgccgccgcaccacgatatctactctatcgaggacttagcgcagctcattttcgacctcaagcaggttaacccgaaagcgatgatctccgtgaagctggtttccgaaccgggagtaggcaccatcgcgactggcgtggcaaaagcttatgcggacttgatcaccatcgcaggctatgacggcggcaccggcgcaagtccgcttagtagcgtgaaatacgcaggctgtccgtgggagctggggcttgttgaaacccagcaggcgctggttgctaacggcttgcgtcacaagatccgtttgcaggtcgatggcggcctgaaaacgggtgtcgatatcatcaaggcggcgattctcggcgcagaaagcttcggcttcggcactggcccgatggtggcgctcggctgtaaatatctacgtatttgccatctgaacaactgcgcaacgggtgtagcaactcaggatgacaaactgcgtaagaaccactatcacggcctgccattcaaggtgacgaattactttgagtttatcgcccgtgaaacccgcgagctgatggcacagcttggcgtaacacgtctggtggatctgattggtcgcaccgacctgctgaaagagctggacggtttcaccgccaaacagcagaagctggcgctgagcaagctgctggagactgccgaaccgcatccaggtaaggcactctactgcaccgaaaacaacccgccgtttgataacggcctgctgaacgcgcagttgctgcaacaggcgaaaccgtttgtcgatgagcgccagagcaaaaccttctggttcgatattcgcaacaccgaccgttctgtcggcgcgagccttagtggctatatcgcccagacgcacggcgatcaggggctggcagccgatcctatcaaagcgtacttcaacggcaccgcaggccagagcttcggcgtgtggaacgcgggcggcgtggaactgtacctgaccggtgatgccaacgactatgtcggtaaaggcatggcgggcggcttaatcgccattcgtcctccggttggttccgccttccgcagccatgaagcaagcattatcggcaacacctgcctgtatggcgcgaccggtggtcgtctgtatgccgcaggccgcgcgggtgaacgtttcggcgtgcgtaactccggtgctatcaccgtggtagaaggcattggcgacaacggttgtgaatatatgacgggtggtatcgtctgcattctgggtaaaaccggcgttaacttcggtgcgggcatgaccggcggtttcgcttacgttctcgatgaaagcggcgatttccgcaaacgcgttaacccggaactggtcgaggtcttaagcgttgacgctctggcgatccatgaagagcatctgcgtggtcttatcaccgagcatgtgcagcataccggctctcagcgcggtgaagagattctggcgaactggagtaccttcgccactaaatttgcgctggttaaaccgaagtccagtgatgtaaaagcactgctgggtcaccgtagtcgtagcgcagctgagttgcgcgtgcaggcgcagtaaggggtagcaacaatgagtcagaatgtttatcaatttatcgacctgcagcgcgttgatccgccaaagaaaccgctgaagatccgcaaaattgagtttgttgaaatttacgagccgttttccgaaggccaggccaaagcgcaggctgaccgctgcctgagctgcggcaacccatactgcgagtggaaatgcccggtacacaactacatcccgaactggctgaagctcgccaacgaggggcgtatttttgaagcggcggaactgagccaccagaccaacaccctgccggaagtttgcggacgagtctgcccgcaagaccgtctgtgcgaaggttcctgcactctgaacgatgagtttggcgcggtgaccatcggcaacattgagcgctatatcaacgataaagcgttcgagatgggctggcgtccggatatgtctggtgtgaaacagaccggtaaaaaagtggcgattatcggcgcaggcccggcaggtctggcgtgtgcggatgtcctgacgcgtaacggcgtaaaagccgttgtcttcgaccgtcatccagaaattggcgggctgctgaccttcggtattccggccttcaagctggaaaaagaggtaatgacgcgtcgccgtgaaatcttcaccggcatgggtattgaattcaaactcaataccgaagtgggccgcgacgtacagctggacgatctgctgagtgattacgatgccgtgttccttggcgtcgggacttatcagagtatgcgcggcgggctggaaaacgaagacgccgatggcgtgtacgcagcgctgccgttcctcatcgccaacaccaaacagttaatgggctttggtgaaacccgcgacgaaccgttcgtcagcatggaaggcaaacgcgtggtggtccttggcggtggcgacactgcgatggactgcgtgcgtacgtccgtgcgccagggagcgaagcacgttacctgtgcctatcgtcgtgatgaagagaacatgccgggttcccgccgcgaagtgaaaaacgcgcgggaagaaggcgtagagttcaaattcaacgtccagccgctgggtattgaagtgaacggtaacggcaaagtcagcggcgtaaaaatggtgcgtaccgaaatgggcgaaccggacgccaaaggccgtcgccgcgcggagatcgttgcaggttccgaacatatcgttccggcagatgcggtgatcatggcgtttggtttccgtccacacaacatggaatggctggcaaaacacagcgtcgagctggatagtcaaggccgcatcatcgccccggaaggcagcgacaacgccttccagaccagcaacccgaaaatctttgctggcggcgatatcgtccgtggttccgatctggtggtgaccgctattgccgaaggtcgtaaggcggcagacggtattatgaactggctggaagtttaagcgaggtaacaatgaattcgccagactgtgtctggcgaatcaaattactgacgaagtgcgcgttgttttctggcaaatgcggcatgagcgtttgacctttcctataatagggataattttcaataaattgtgctttgttcaccaagtctgatgagtgaagcacatcaagcaatttctcatttacaatccgtctcaattacttgttaacacctctgacaataccgattctgcaagctattcagtcttttcattccatgtaaattgtctcgatattaatatacaaaatatgaatataaaaaaccaatatattatccttaattatctatatattttcctatttttcagcgcaaacattcatgtaatgaataattatcaccacaaaccacctcaccagcaccttattattcacatgatcgtaactataaaattcattaaataaatacatcccagcaagttggctatttctgaacgagttatttatttacattcacaaacagatatatatactgcttcagctttttattttaaaaaataaatttgttattaaggatatgttcatatgtttttcaaaaagaacctcacaacagctgctatttgtgcagcactttctgttgcagcattcagtgccatggcaacagatagtactgatacagaattaactatcatcggcgagtatacccctggtgcatgtaccccagttgttacgggcggcggcattgttgactatgggaaacatcataacagtgcgctgaatccgaccggtaaaagtaataaactggttcaactgggccgcaaaaacagcacattaaatataacctgcacagcaccaacgctaattgctgtaacctccaaggataaccgtcagagcaccattgtagcgttaaacgacacatcctatattgaaaaagcttatgatactctcgtagatatgaagggaacgaaaaacgcctttggtttaggttctgcgcctaatggacaaaaaattggcgctgcatccattggtattgacaggtctaatggtgggattcacgcggcggacgatacaggtgaaattcctgtcgacctgattcaaactgaccactggagtgcagcgacccccacatggaaagccagttctaatggcgcattctgcagcctgacaagttgcagtgcaatcgagcgcggttattctgttgcaaaaacaggggaactgacacctgttgctattacagcggtcaccttcccgttactgattgatgctgcggtaaatgacaatactattcttggttctgatgaaacgatcaaactggatggtaacgtcactatcagcgttcagtatttataagaacttgtaatacagtttttatttttacgcattaaccagttagctataactcggacagattatgccctatgacatggtctgtcttaatcaatctcatcgcaaacagtgcataacatatattaacaatatgtttctgcgttatttatcattattacaggagttttaatttaaatgctcagacacattacattcactgtatttataacaacatcaatgaatactaacaatgccggacaggagtactatcaggcattcgttttatacgatcggttaatgtttcaggaaagctcttcgcatatcttggggaaagtaaatgtaatacgctgttcttaattgttcagtgctcaccccccagagtatagctcattccattattcaacttagctccatataaagggacagataatggaaagcctcagtgaaggaaccacagcaggctaccagcaaatccacgacggtattattcatctggtcgatagcgcccggacggaaacggtacgtagcgttaacgcgttaatgaccgcgacgtaccaggaaattggccgacgaattgtcgaatttgaacaaggtggcgaggccagggctgcgtatggtgcgcagctaatcaagcgactaagtaaggatttatgtctaaggtataagcgtgggttctctgcaaaaaacttacgccaaatgaggcttttttacctcttttttcaacatgttgaaattcaccagacaatgtctggcgaattaacaccattgggaattccgcagacaccgtctgcagaattcccaagcgcaaagatttggcagacgctgtctgccaaatctttccccttgcccaggtccacctacgtccgtttactttccgttaaaaacgctgacgcccgcagcttttatgaaaaagagacgctccgctgtggctggtctgttcgccagctagagcggcaaattgcgacccagttttatgagcggacactactgagtcatgacaaaagtgccatgctgcaacaacacgctcctgccgagacgcatattcttccgcaacaggcgatacgcgatccctttgtgctcgaatttctggaattgaaagatgaatatagtgaatccgattttgaggaggcgctgatcaaccacctgatggatttcatgctggaacttggggatgattttgcctttgttggtcggcagcgaaggttacgcattgatgacaactggtttcgtgtcgatctgctgtttttccaccgccgtttacgctgcctgctaatcgtcgatctaaaagtgggcaaattcagctatagcgatgccggacagatgaatatgtatctcaactacgccaaagagcactggacgctaccggatgaaaatccgcccatcggtctggttctctgtgcagagaaaggagccggagaagcgcattatgctctggcaggtttgcctaacaccgttctggcaagcgaatataagatgcaactacctgatgagaaacgactcgcagatgaactcgttcgaacacaggcggtgctagaggaaggctatagacgccgttaatttcagcggtttcgaattctgcagacagtgtctgcagaatctttaaaacgaactaagttttaagccattaaatcagccttaaccttcaccacaacctttttaatctctccaggctcgccgacaacgcatcctggtttatgcggttcacctggcataaacacggcgaacattcccggttttaagatgatggcttgctcgttatcaatggtgctgcaaagctgataatcatcctcatggtggaactcttcacactgacgcgcagtgcctgccatgccaaacagaatccgttcctcaccgtttaataacagctggatatcaatgtattgctcgtgcaattccgcttttttctcgacggggctttgagtgttaaacgtcatgacattcataaagatattgtcgccctgtaattcgtaacgacccggcgctttttcttgcggtctggcagctaatgccagcgttaacgcgtcctgtaacgcaggatgtaacccagcagacggtaaactctgtacttcacccatcatcataatttttctccctgggccaacagcgcagccccaagtaaacctgcatcatggcggtaatgcgccgccagtaaatcaacatgaaatgccgctggctcctgcgccagatacgtttccaccagcgccagatacccttctgccagaccaacgctgccaccgaccaccacgcactggcaatcagttgtggctttaatatcagcgatcagccttgcaagcgtacgtgcggagcggtgaatcagctgctgcgcctgctcgtcaccctgcccggcgcgcgtgaaaatagttttcgcatccgcgccagccaactccccctgcgctgccgctgcaatgccgcgaccagaagcaatcgcttccacgcaacctgtgcgtccacagccgcagactgggccgtgtggatcggcaagcgtatgcccgatatgccccgccagaccgccagggccggtaagcagtttgcagccgctcactacaccgccgccaacgccggtggaaacggtgataaagaccatatcggttatatcgccatccagcgcctgaaactccgcccatgctgcggcctgcgcgtcgttaatggcaatggtcggcaaattggtaagttgttccagcgttttgactaacggaaagtgtagcaatccaccaagattatgcggattaagcgccagcaagctgccgtcacggattatcccggtgctagcgatggcaacccgctgcgcatgagcttgcaacggagagactaatgcggataaggcatcacgcaaggcttctggtgtctggctggctggcgtaggaagttcacgacgatcgcggatctgcccgtcagcgccaatcagcgcggcggcaagtttagtaccgccgatatcaatcgccagtgtggtcatagcaccgcctttttcatcgctgtgttgtaccactgacaaatgtgctcaagacgcgtgattgcagaaccgaccgtcaccgcccacgcgccgtggcgcatcgcatccgccgcctgagcaggcgtgttgtaacgcccttcggcaatcacccgacatccggcgtcgctcaacgttttcaccagcgccagatccggctcttctggcgtttcaggcgtggtatagccagaaagcgtagtgccaataatttcggctcccagcttttggcatgccaggccgtcttccggcgtactgcagtcggtcatcgccagtaaaccgtgatggtgaatacgtgccagcagcgtttcaacaggcaccggacgcgggcggtcggtgccgtcaatggcgataatgtccgcgcccgcctgcgccagcgcatcaacatcttcaatataggccgtgatgcgtaccggagaatcctccagatcgcgtttcacaattccaataatcggcacgctcaccaccgcacgcgtggcttgcagatttgccacaccttcaatgcgaatggcaaccgcgcccgcctgttctgccgctaatgccatggcggcgacgatttcgggtttatcgagcgggctgtccggaaccggctggcaggagacaatcaggccaccgttagcagcgattttttgatccagttgtgcaagtaagctcatacatcttcccttagcgaaaggcccggtacatagaccgggcaacaggattaacttttggttttgactaaatcgtttttggcgctgccaaacggcacggcaccgctgaatggtttaccgtcgatagcgtcatgagtacgcaacgcttccgggcgcaaccaacgctgaacgcgagaaggcatatccagcccaatcagcaggatcaccacgaacgtcagactgaagctgaggcttgccagcgcagtacccagatccagacgttgagcgatcaacgcgccgatgattggggccagtgcaccgcccaatgcgccaacgttgtaggtaaagcccaggcccgctgcacgctggtcggtatcgaaataaccgccaatcagttttggtaagatcccggcgatcccttgtccaagcatttgctggaagaacagtaacagaccgagcacccagacgtttgcgccgccaatcgcaaataccggaataatcagcagctggctggccagcaggctacaaacgtacgctttgcgggttcccagccagtcaccgaggaagccacctacgcagcatcccaccgccgcgccaaagccactaaagaacagcacattggctacagtatgcgggttataagccagatcggttttcagatacgttggcagcagcgcctgaatcggccaactgtagaggaaagcaaacaacacgaccaccatcagcattacgcccgttggccagcgtttgcctgcactctgcaccataaagctgataaagattgcggcgcataacagcccaagaacagcgacgatcgcggcattttgcaggttaccggcgaagcagaaccacagcgcagtagccgccgccagtgtcattacgatattggcaatgcgatgttcaccacggtagagaatatccaccattgtgcgtactggtgctttacctgcgtgtttctctttccagtcttccgcttccgggatgtttttacgcagccagagagcaaagatgattggcaaaatgccgataaagaacagcgcacgccagccccagaccggaaccaccaggctatagacctgagcggcaacgacggcccccacagagaagccactaatcaaaaaaccactggctttgttacgcagatgttttggccagctttcaatgacataggtggcgctggaaccgtattcacccgccatccccatgccgatgaccagacgagcgataaacatggtgatgtagcctggcgcaaagccgcaggccagcgtcccggcgctgaagagaacgatgctggtgaccattgccagacgacgcccgtagcggtcacccatagcgccgagcatcaggccgccgaaccagcgagagataaaggctgcagagatcagacttgccgcctgcaccgtcgtcagcccgaattcaccttgtacttcggtgagtaccagggcgattaaaacgaaatcaaaaccgtcaagcagatatcccaaccaggcagcggaaaatgcgcgccattgtgcacggttgagatggcgataccacgggatattctgggttgtagtactcattgtgagtctcccgcggtgggcgatgcccacacgctttggtatgaaaattgtagggtacagatgcgtttatttcccctcacccggtaggggcgagcgaggggaaacaactcacccgcgctcttgcatcaactgctgggccagcgccttcagttctggcagatatttttcatctaccggtccaaacggtttgcggcacagcggcacagaaacgacatccatataatggaggacagttttcaggccgcggaatacgcccgttttgatcagtaaatcaatgactttattgcattcagtttgcagtttctgcgcggtctggatatcgccttctttcagcgccttaacgatcccctgatagcgccagcccatgatgttgtaggtactgccgataccaccatcagcgcccgccagcagaccagaggcgaagatttcgtcgtaaccgttatagagcacaagatcaggatgttcacgacggatctgctccatctgatagagatcgccagaggtctgtttcagcgcacctacgccaggcaatgtaacaagtgtgttgatctgatccagggtcagttttaccccactcagggctggaatgttgtacaccaccatcggcaaaccatccgcgctatcaataattgcccgatagtgatcgcagtgttcttcaaagctgaaaggatagtagaacggcgtgacggcggagacggcatcgaagccataacgtttagcgcttgccgcaagttgttggctttcggcggtgctgacgcaaccgacgtgggcgatgagtttaatcttacctttcgcctcttcggcgacgatttccagtacctgttcacgctcggaaaggctttgtacaaaggcctcgccggtgctaccacccacgtataaaccgtcgatgccctgctgaatattgaactgaaccaggcgacgcagactcgctttatccagtgcttgttgttggtcaaaaggagtcaggagtgcagccattacgccacgtaaattcgttgccataaatacctctgaagtgatgcttgtctgataaacgatatacctttatacctgttataccagatcaattaagcaacaccccatacagaaagcttataatgcgatctgcttcactaaagtggcattatttctttttgttggtggtctgaccgaaagcgtgccaggtagcagagacgctgttgagatggctttgcaacgcacgatcggcttcgtcaggatcatgacggcggatcgcatcaacgatcgcaatatgctgttgataactaacgttgttatgttcgtgcagtgcctgatcggtaaccgttgggcgtgcggcaataagccagtcgagcagggcaacgtggatcgccatgaagattgggttaccggggatctccgccagcacgcggtggaaatcaacgtcactacgaatgaatgccgcgttgttatccaggctctgactgttgatttccagtgcttttgccagcaaatcgatttgctcatcggtggcatgttcagccgcatagcgcaccagactggattcaaagaacagacgtaattgttcgaaatgggcaatcccaccgggatgagaaaggaaatctttcgccatgccggaaagctcaccgatgatagtgtccgcagaaggacggctgacgcgagcgcgttcgccgttgtttatttgcaccagacctttgcgttttaacgctgccagcgcttcacgcacgctaggacgcccgacgttaaagaacgccatcagttcgcgttcagacggtaattgttcaccttcgccaaattcacgacggcggatcatctgttccagctcttcttccaccatttcggagagttttttacgcgccagcgggcggctacgcaagttgcgaccaattgcaggactagaatcttcggtttggctatcaaatgcgttcataaggcccattctgtaaggtcagtgtgattaacatcatcagtgacatcctatcacaggattgaaagtaggggaaaatggcagggttttctctttgtgcctcatcattaccataattaacggaataattaactattgcgaaaaattaatgtaacgcagataaaaacatcccgtttgaattatttataagactattcacgagcattatgaatattatgaatgtgttcttacaaaataatcataagcgcatattttttaatgaaaaatcacctcacctacaattaaaaacacgacatccgcaccataaatagccttgcaaaaaatataacatcgttgttttcaatctgccgtttatgggattgaccgttttcttttgacacggagttcaacaatgttcggcataattatatctgtcatcgtattaattacgatgggctatttgatcctgaaaaactacaaacctcaggtggtgctggctgccgcaggtatcttcctgatgatgtgcggtgtctggttagggttcggtggtgtactcgatcccaccaaaagcagcggctacttgatcgtcgatatttataatgaaatcctgcgcatgctgtccaaccgcattgccggattggggctgagcattatggcggtgggcggttatgcccgctacatggagcgcataggggccagtcgcgcgatggtgagcttgttaagccgcccgttaaaactcattcgcagcccgtatattattctgagcgcaacttacgtcatcggccaaatcatggcgcagtttattaccagcgcctccggtctgggtatgttgctgatggtcaccttatttccgacgctggtgagtctgggagtaagtcgtctctctgcggtggcagttatcgcaaccacgatgtccattgagtgggggattctggaaacgaactccatttttgctgcccaggtagcgggaatgaaaattgccacatacttcttccactaccagcttccggtcgcctcttgcgtcattatcagcgtggcgatctcccactttttcgtgcaacgcgcttttgacaaaaaagataaaaatatcaatcacgaacaggcagagcaaaaagctctcgataatgtcccgccgctctattacgccattttacctgtgatgccgttaatcctgatgctcggcagcctgttcctcgcccacgtcgggctgatgcagagtgaactgcatctggtggtggtgatgttactgagtttgactgtgacgatgtttgttgagttcttccgcaagcataacttgcgcgaaacaatggacgatgtgcaggcgttttttgacggcatgggtacgcagtttgccaacgtggtaacgctggtggtcgcgggtgaaatatttgcgaaaggcttaacgacgattggcactgtcgatgcggttatcaggggggcggagcattctggtctgggcggtattggcgtgatgattattatggcgctggtcattgccatttgtgccattgtgatgggctctggcaatgcgccgtttatgagttttgccagtcttattccgaatatcgcagccggactacatgtaccagcggttgtaatgattatgccgatgcattttgccacgacgctagcgcgcgcggttagcccgattactgcggtggtggtcgttacgagtggaattgcaggcgttagcccttttgcggtggtgaagcggacagcgatccccatggcagtcggtttcgtggtgaatatgattgccacaatcacgctattttattaagtcattaaaaagacaaaacaggccgcctgggcctgttttgtattacttcacaacgcgtaatgccggtcgaccaccgcgtggtggctgcggaggttcatcgtcaggatgagtgtcatcatcgtgatctggcttgtcgccatcaataacgctcataacggtttcgttgtctgcgcttgcctcttcatcattcatgatgctggtatcttcatcgtaggcagcttcaggctcaaacatcgtgcctgcgccattttcacgggcgtagatagccagcacggcagccagcggcacagaaacctgacgcggaatgccaccaaagcgcgcgttaaagcgcacctcatcattcgccagttccagattgccgacagcacgcggcgcaatgttgagtacgatttgcccgtcacgcgcatattccataggaacctgcacgccagggagcgtcacatccaccaccaggtgcggcgtgagctggttatccagcaaccactcatagaatgcacgcagcagatagggacgacgtggtgttagctgactcaaatccatacagattaactccggcccagacgcatttcacgttctgcttcagttaaagaagcaaggaaagagtcacgctcaaagacgcgggtcatatagcctttcagctctttcgcacccgggccgctgaactcgatgcccagttgcggcagacgccacagcagcggagcaagatagcaatcgaccaggctgaactcatcgctcaggaagtacggcttctgaccgaagaccggcgcaatcgccagcagttcttcgcgcagttgcttacgtgcggcatctgcttcagaagcactaccgttgatgatggtgttcatcagcgtgtaccagtctttttcgatgcgatgcatgtacagacggctttcaccgcgagctaccgggtaaacaggcatcagtggcggatgcgggaaacgctcatccagatattccataatgatgcgagattcccacagggtcagctcacgatccaccagggtcggaacgctctgattcgggttgaggtcaatcagatcctgaggcggattgtccttttccacgtgttcgatctcgaaacttacacctttctcagccagcacaatgcggacctgatggctatagatgtcagtaggaccggaaaacagcgtcattacgctacgtttgttggcagcgacagccatgaaaacctccaggtatagtcagaatttttactgctaccagccaccaggtggccagtcagaagttgtgttacccaataaggaacgactctctttgttcgaaaatcaaacaaaaaatgagcaatacccgacatttgggcagaaaattggatgatagtttaccagattttgcgaccattgtggtgagtcgatgccggaaatggggaaaaagagatgcgctttagtctgaaatagttgacttagtcccttattggcgatgtggtttttgttttacctgtctgtcaggtggcagcaaaaagcaactttccagtttttacgctgattcagattttagctataaaaaaacccgccgaagcgggttttttcgaaaattgttttctgccggagcagaagccaattaacgtttggagaactgcggacgacgacgtgctttacgcagaccgactttcttacgttcaacctgacgagcgtcacgagtaacgaagccagctttacgcagttcagaacgcagggactcgtcgtattccatcagagcgcgggtgataccgtgacggatcgcaccagcctgaccagagataccaccacctttaacggtgatgtacaggtccagtttctcaaccatgtcgaccagttccagcggctgacgaactaccatgcgggcagtttcacgaccgaagtactgttccagagaacgttggttgattacgattttaccgttgcccggtttgatgaaaacgcgagctgcggaacttttgcggcgaccagtgccgtagtattgattttcagccattgcctataatcccgattagatgtcaagaacttgcggttgctgtgccgcgtggttgtgctcgttacccgcgtaaactttcagtttacggaacatagcacgacccagcgggccttttggcaacatgcctttaaccgcgatttcaatcacacgctcaggacggcgagcaatcatctcttcaaaggtcgcttgtttgataccaccgatgtggccggtgtggtgatagtacactttgtcagtacgcttgttgccggttacagcaactttgtcagcgttcagaacgatgatgtaatcaccggtatctacgtgcggagtgtattccgctttgtgcttaccgcgcaggcgacgagccagttcagtagccagacggcccagagttttaccggtcgcgtcaacaacataccagtcgcgttttacggtttctggtttagctgtaaaagttttcattaaaagcttacccaataaatagttacacgttggtgaacacccaaacgtcttcaattgttgaggttcacacgacaaagtccggcaaacctaccccttcgaatagcctatgccagcacacaaaaagttttgggaaaaaaactttcttgtaacgtggggtcgcaggattatagagaagtcggggtcaaagatcgacccctttttgtgatttgtgacaggttttaacccgccaaatgctcgcgcttcagatactcttcgctttgcatctcttgcagacgactcaggcaacgctggaactcaaacttcagccgatcgccctgataaatttcatacagcggcacttctgcactcaccactaatttgacatggcgctcgtaaaactcatccaccagcgcaataaagcgccgcgcttcgctctccatcaaccgcgtcataactggtacatcaaacaacatgaccgtatgaaagagacgactgagcgcaatatagtcatgctgactgcgggcgtcgacgcacagcgtagtaaaagagaccgccagcgtctggttctcgacgcccattgttgctaatggccgatggttgatttctaacgtcggactattttctcgtttcccccccgccagcgccaaccatagtttatccatttgcgcccgggtttcatcgtgaagtgggctaagccacagatgcgcctgagtgagtgtacgcagacgataatcaacaccagcgtccacgttcattacatcacaatgctgtttaatggcatcgattgcaggcagaaaacgcgcacgttgcaggccatttcgataaagttcatccggcggaatattactcgtcgctaccagggtaataccgcgagcgaacagggctttcatcagaccgccaagtagcatggcatcggtaatatcagaaacaaaaaattcgtcaaaacagagcacgtcagtttcggctttaaagcgatcggcaataatttccagcggatcggtctgcccctgtaaggcagttagctcttcatgcacccgcagcataaaacggtgaaagtgcaggcgctgtttccgctctcccggcaggctttgatagaaaaggtccatcagccaggttttcccgcgtcctacaccgccccacatatataagccacgcactggcgtatgctttgtgtcttcgcgtttaccccacagcttaccgacccgcgccattagcccactcgtcctgggggctggtggcgtgctattgatgagttcctgataaataatttccaggcggctgacggcctctttttgaacgtcgtcgggttgatggctgccttcattaagcgccttcaggtattggcttgttggggtaacgctttgcatgatcttattgttattccttgaataatcggtgcgccgttgttcacggttgacgaaaaaaaggccgttctacactacgcgatatgcagtcgggattccacttctgtggaattaacggttatagtggcataatcagccgcaggcatggagcctgaagccaacaccctacggaaacaaaagacaacgggagatgttcatgacctgggaatatgcgctaattgggttagtcgtcggcatcattattggtgctgtggccatgcgttttggtaatcgtaaactacgccagcaacaggcgttgcagtacgaactggaaaagaataaagctgaactggacgagtatcgcgaagagctggttagccactttgcccgcagcgcggaattactggataccatggcgcacgactatcgccagctgtatcagcacatggcaaaaagctccagcagcctgctgccggaactgtctgctgaagcaaacccgttccgtaatcgtctggcagagtctgaagccagcaacgatcaggcaccggtgcagatgcctcgcgactattctgaaggcgcatccggcctgctgcgtactggcgcgaagcgcgactaatttatttttcgggcgcagccattgcgccctcctcttctctccctccccgactatcatttaatctggtgtctcattgttagccgtctgaaaattcaataacatcaaactgttttgaatctcttttcttatcattcaggtacgagagcaggaataatgaaaaaacaaacccagctgttgagtgcattagcgttaagtgtcgggttaactctcagcgcgagttttcaggccgtcgcgagcattccaggccaggttgccgatcaggcccctctccccagtctggctccaatgctggaaaaagtgcttccggcagtggtgagcgtacgggtggaaggaacggccagtcagggacagaaaatcccggaagaattcaaaaagttttttggtgatgatttaccggatcaacctgcacaacccttcgaaggtttaggctccggtgtcatcatcaacgccagtaaaggctatgtgctgaccaacaaccatgtgattaatcaggcacagaaaatcagtattcagctcaatgatgggcgcgagtttgatgcaaaactgattggtagcgatgaccagagcgatatcgccctgttacaaattcaaaacccgagcaaattaacgcaaatcgctattgccgactccgataaattgcgcgtcggtgattttgccgtagcggtcggtaacccatttggccttgggcaaaccgccacctctggcattgtttccgcattaggccgcagcgggttgaatcttgaaggtctggaaaactttatccagacagatgcttccattaaccgcggtaactccggcggtgcactattaaaccttaacggtgagttaattggcatcaacactgcaatccttgcgcctggcggcgggagcgtcgggattggatttgccatccccagtaatatggcgcgaacactggcgcagcagcttatcgactttggtgaaatcaaacgcggtttgttaggcatcaaaggcaccgagatgagtgccgatatcgccaaagccttcaaccttgacgtgcagcgtggcgcgtttgtcagcgaagtgttgccaggttctggcagcgcaaaagcgggcgtcaaagcgggcgatattattaccagcctcaacggcaaaccgctgaatagctttgctgagttgcgctctcgtatcgcgaccaccgagccgggcacgaaagtgaagcttggcctgctgcgtaacggcaaaccactggaagtagaagtgacgctcgataccagcacctctagcagcgccagcgctgaaatgatcacgccagcgctggaaggtgcaacgttgagcgatggtcagctaaaagatggcggcaaaggtattaaaatcgatgaagttgtcaaaggaagcccagctgctcaggctggcttgcaaaaagacgatgtgatcattggcgtcaaccgcgatcgggtgaacagcattgctgaaatgcgtaaagtgctggcggcaaaaccggccatcatcgccctgcaaattgtacgcggcaatgaaagcatctatctgctgatgcgttaatgtcgtaaaccgggcatcaggcttacgtgtgatgtccggttaactcgtggtatgctgctgccgttcccttttttaatgacgcctccatcatgtttgtgaagctcttacgttccgttgcgattggattaattgtcggcgctattctgctggttgccatgcctagcctgcgcagccttaacccgctttccactccgcaatttgacagtaccgatgagacgcctgccagctataatctggcggttcgccgcgccgcgccagcggtggttaacgtttacaaccgtggtttgaacaccaactctcacaaccagcttgagatccgcaccctgggatccggtgtaatcatggatcaacgcggttatatcatcaccaataaacacgtcatcaacgacgccgatcagatcatcgtcgccttacaggatggacgtgtatttgaagcattgctggtgggatctgactctctaaccgatctggcggtacttaaaattaatgccactggcggtttacctaccattccaattaatgcacgtcgcgtaccgcacattggcgacgtagtactggcgatcggtaacccgtacaacctcgggcagaccattacccaggggattattagtgccacgggtcgaatcggtctgaacccgaccgggcggcaaaacttcctccaaaccgatgcttccattaaccacggtaactctggcggcgcgctggtgaacagcctgggcgaactgatgggcattaatacgctgagctttgataagagtaacgatggcgaaacgccggaaggtatcggctttgcgattcctttccagttagcaaccaaaattatggataagctgatccgcgatggtcgcgtgatccgcggctacattggtatcggcggacgtgagatcgcaccactgcacgcgcagggcggtggtatagatcaactgcaagggatcgtggttaatgaagtgagtcctgacggcccggcggcgaatgcgggtattcaggtcaacgatctgattattagcgtggataacaaaccggccatctctgctctggagacgatggatcaggtggcggaaattcgccctggtagcgtgatccctgtagtagtgatgcgtgatgataagcagttaacgctgcaggtcaccattcaggaatatccggcaaccaattaagtcgtgcgctcaaaacaaaaaaccggagtctgtgctccggttttttattatccgctaatcaattacttattaacgaactcttcgcccagggcgatatctttcttcagcgtatccagcataccttccagcgcgttctgttcaaatgcgctcagggtaccgatagatttacgctcttccacgccgtttttacccagcagcagcggttgagagaagaaacgggcgtactgaccgtcgccttcaacgtaggcacattcgacaacgccttgttcgccctgcagtgcacgaaccagagacagaccaaaacgtgcagctgcctggcccatagacagggttgcagacccgccaccggccttcgcttcaaccacttcagtacccgcgttctggatgcgtttggtcagatcagccacttcctgctcggtaaaactaacgccaggaacctgactcagcagcggcagaatggtaacaccagagtgaccgccaataaccggcacttcaacttcgcctggctgtttgcctttcagttccgcaacaaaggtgttggaacgaatgatatccagcgtggtaacgccgaacagtttgtttttgtcataaacaccggcttttttcagcacttcagcagcaattgcaactgtggtgttaaccgggttagtgataataccaatgcacgctttcgggcaggttttcgcaacttgctgtaccaggtttttcacgatgccggcgttaacgttaaacaggtcggaacgatccatacccggtttacgcgctacgcctgcagagataagaacgacatctgcgccttccagcgccggagtcgcatcttcaccagaaaaacctttgattttcacagcagtagggatatggctcagatcgacagccacaccgggagtcactggagcgatatcatacagagagagttcactaccactaggcagttgggtttttaacagtagtgcaagcgcctggccaataccgccagcagcgccgaggactgcgactttcatcctaaactccttattatattgataaactaagatatgttgctccgctgccgcgaccttaatccacaaaattgccgtttacaatgaccacatctcaagaatgtgtagtcacgcaagtttagcgtttatgcatttaattgccgtaatcaggaacctaacttacgtaattaacagtcgcttatgcattagcgcaacattccaacaggtggtgacaatataccctaccgttcagccaaaacaacatcaatttgataacaattaatttacttttaagcagaatttgcatgccgtgacgcaggcatgtttctcaataacgaaatttgataaaatcccgctctttcataacattatttcagccttcttcagggctgactgtttgcataaaaattcatctgtatgcacaataatgttgtatcaaccaccatatcgggtgacttatgcgaagcagcgctaagcaagaagaactagttaaagcatttaaagcattacttaaagaagagaaatttagctcccagggcgaaatcgtcgccgcgttgcaggagcaaggctttgacaatattaatcagtctaaagtcagccggatgttgaccaagtttggtgctgtacgtacacgcaatgccaaaatggaaatggtttactgcctgccagctgaactgggtgtaccaaccacctccagtccattgaagaatctggtgctggatatcgactacaacgatgcagttgtcgtgattcataccagccctggcgcggcgcagttaattgctcgcctgctggacagtctgggcaaagcagaaggtattctgggcaccatcgctggcgatgacaccatctttaccacccctgctaacggtttcacagtcaaagacctgtacgaagcgattttagagctgttcgaccaggagctttaatctctgccccgtcgtttctgacggcggggaaaatgttgcttatccctctcaaccccctgctttcccctgcgattaatttaacgaatagtgcgttttactgcgacatgtcattcacacaatgaatacataaggtaaaaaaagcacattatgcaaaattcattatctaattgaaaaaactagaattaacgataaataaccgtatttttaattcttttttgttattaaaattcacatttttaacacttagtatcaactgaaacagttagcgcggtattaattagctcaataattagtgtatacttgattttgtgatatgggtcacgaaacaaaggcccagctaaaagattatgtcgaggtaaaaatcatgaaaatcaaaaccactgttgctgcattaagcgtactttctgttctctctttcggtgcattcgctgccgactccattgatgctgcacaagcacaaaatcgtgaagcaatcgggaccgtatccgtaagtggtgtggcgtctagcccaatggatatgcgtgaaatgctgaacaaaaaagcggaagagaaaggcgcaacggcctaccagattactgaagctcgtagcggtgacacctggcacgctacggctgaactgtacaaataaaccctcatcgtcttgtccgacgatattgcccccggttcgggggcttttttttgcgttaatgacgaacattaaaacgcaaatgcccttccagctcttcctctgcctcatcaaacagcaatattaacgcgccaaaacggcgacgcgttttctctcccagatgaacaaattcaatctcaagtggtagcggcaggacatcgttcattaacacatcccatagactgtcgagatcgcgtaccttatctttcgccagaccaaaggtttggctaaagtcacgataaaaatcctcctgactctcaatctcatcaaaatcaaaggtataaatattcatctgttgccaccgtcacgtttcgcggcgagttctgccgtgcatcgctaagtatagccatgaaaaaaccgacgcttttggcgtcggttttgacttaactatcggtcaacgcatgttgatacttatggagcatccccgccagccgatttaccggttccgtcacctgcggtggcgcttgccagatgcgtagcttttcctggtagatttccagttcttccagcaactggccaaagtaccgacgacgtttatcatcgctacgggcagatatcacatggtctgctgtgcggcgcatttgtcggtgaaacgcgcttaaatcctcgttaaccgggatcggtgcatcacgcaggcgctggtgcgcgataatcatcgtcagcgccaggcgaaatttcggcaaatcccctgggaacttattcatcagcaaaaacagctgctgataaagtgccgggaggtggttctctttacgacgtgccacattggtagtcatcgcggaaacagcggcagaaacaaactgattaagcagtacacgtccggtcctgtcgcggcttttatcccgcaccagcaaaataacggtgaacgcgagcacacagccgacgatttgccctaatgcgctgtcgagaaactgactgaaatggaaagtcatcgggttatccagcacgataatatttatggtgctggccagtgcccccatgctgcccagtcgccgtttctgtacttctataccgaggaagaatcccagcactgccaggctaatgcacagcagcaacatgctctgttgggtattagggataatcaccaaaaagtagagcagccctaacggcagcgcggccagcgtcccgtagataaagtcgatcgccaccatgcgtggattcggcaaacgcattgccagactcgtcactaccgcaatcatcaccattgcaccactgccggaagtccagcccgtccacagccagaaaagcgtgcccagaatgcaggaaagtgtggttcgccagaagttacccattgcatgatgacgttcggcactctctacttttacttccggttcgccttgcaggatctcttcttcggtggcgttgatttttgtgttactgataacgccgcgcttgagaagctgataacgcgttgccgccgcgacccagctataaatggtgacaggcgtttcccgttccccggtccaggcgataactctccgcaggcgtttgagctgcttgtggacgtcctgcgcggtttctaccggcgtgtcaaaaaattcgcggaaagtatcagtgatcaattccgggcgcgtattctgaataagataagtttcgcaggattgggtaatcagcgtcaggcttagcgtattgatcgcttttaaacgtcgattggcccgcgcccagcgggaagattccatattcaggttgctgcgcatgccttgtagcgccgtggtgcgtcgcaccaggtcgccccaggctttatcgacaacttcaccatcgccatgcttgatacagagttgcattaattgatattgcgcgaccagcaaactttccagctctcgatccacttcttgtttgatgcttcgcggagaaaagagcaaatccgccataatcgcacacacaataccgataacgatctcgctacaacgttcgacggcaaactgcggcgtaagcaatggttccggctgaatggtgatcacaatgatcagcgcggtataaccggccagcccccacgcatagctgttttctattcgtaccaggctggatatccaggtacaaaaaccggcccagatacagcacaccagaatcatcaataatggtgcgcggatcatcgcaatgatgatcaccagtccggcaatacagccaataaatgtgccgatgatgcgcaaaaagccacgatagcgaatagcgccagaatacggttcacctcccgcagcaaaggccgtaccggcggcaacaatcgccgctgtcagtaccgcccagcgtggcgtttccagctggaagtgaaagccaacaaacagcgccagtacaatggcggtcgccagttttaccgcaaagcgaatatgttggttagcaatggagaaaatacccatcgtgattaaccaaactcacgcaggcgatgggccattttacggaagaagctatcctggctttcgtcgcgatcttgtttgccagtgaccaccactgtagcagtggtgcccgcaggccagatgttctcttgctggttgtcgagacgaatacgaaccggaacacgttgcgcaagacgcacccattcaaggttagagtctatagtcgccatccctttgtcgtcacgcgtgctgctggcgttggtgacccctgcggcaacactatcaacagtccctttcagcactttgttactgccaagcggcgtgatctctgcacgataccccggacgcaccccttccagcttagtttcttccatataggccagtacatagaaggagttctgtttcaccagcgcaaccgccgtacttcctcgagtaataaactcaccggtatagacgttgaggttggtcacccagccatctgctggcgcgcggatcaccgtgcgttcaagatccagttttgccagatcgcgggtcgcctgcgctttcgctaactgatgcagaaccgtttgtagtacgttgttggcctggtcgatctcttcgcgagacatcgcctgcacaccgagacggttacgacgtccggcctcctggcgtttctcctgtgccagtacctgataataagcaacatcggcttgcgcttcctcaagcgccttttgatagcgcggctggtcgatggtgaacagtatctgtccttttttcaccagctggttatcatgaacattcacctgggtaatgagtccagaaacgtccggcgcgatcgcaacgacgtcagcgctaaagcgcgcgtcacgcgtccagggggattcggtgtaatagacccaggcattaaaaattgcgatgaaggccagaatgactaatacgaccgtgatggccgtacgggagaattttcttattagtgttttcacttcaacctcaaacgaacagtcggcttatcaaataaaacaagcagcaatagagcgcggtgttgaacaacgccggatgccagacaaagtcgtagatacctgttggcacaagtacccggcgcaccagccagaaaatcgccagacttaaaagcaattcaaaaaatatcggtgggaaggacagcccaaacaccacgataacgggaaacagactcatgttgaccttggttgtaaagagagagcaggcgttattattttcagcatctgtcgccgcagagaagggcatggaaagccgggcgagagcaacattgctgtagattgatatttaatatattagcgtaactgttatgctgttatctatattatgtgatctaaatcacttttaagtcagagtgaataatggaacgactaaaacgcatgagcgtgtttgccaaagtagttgaatttggctcttttaccgccgccgccagacagctacagatgagcgttagctccatcagtcagacggtaagtaaactggaagatgagttgcaggtaaagctgttaaaccgtagcacacgcagcattggcctgaccgaagccggtagaatttactaccagggctgccgtcgtatgcttcatgaagtgcaggatgttcatgagcaactgtatgccttcaataacacccccatcgggacgctacgcattggctgttctagtactatggcacaaaatgttctcgccgggctgacagccaaaatgctgaaagaatacccaggtttgagcgtcaatctggttaccggaattccagcccccgacctgattgccgacggtctggatgtggtgatccgcgtcggcgcgttgcaggattccagcctgttttcccgccgtctgggcgcgatgccaatggtggtgtgcgccgcgaaaagctatctcacacaatacggcataccggaaaaacccgccgatttgagtagtcatagttggcttgaatacagcgtgcggcccgacaatgaatttgaactgatcgcaccggaagggatcagcactcgcctgatcccacaaggaagatttgtgactaatgatccgatgacgctggtgcgctggctgacggcgggtgccgggatcgcctacgtgccgctgatgtgggtgatcaacgagatcaatcgtggggagctggagatcctgctgccgcgttaccagagtgatccacgcccggtttatgcgttatataccgaaaaagataagctgccgctgaaggtacaggtcgtgatcaacagcctgacggattattttgttgaggtcggtaaattgtttcaggagatgcacgggcgcgggaaagagaagtaattcatattgtactgttacgttgtacaaacctgtgccaacgggttcccctcaccctaaccctcaccccaaaggggcgaggggaccgttcgtgcacgtagaaagattaattatccttctgaaaatagtgaaattattacgcagtaccgccaacagtcaggttatcgactttcaacgttggctggcccacgccaaccggcaaactttgcccttctttaccgcagacacccacgccgttatccagtttcaggtcgttgccaaccatgctaatctgctgcatggtttcgataccggaaccaatcaacgttgcgcctttcaccggcttcgttactttaccgttttcaatcagatatgcttcactagtggagaaaacgaatttgccggaggtgatatccacctgaccgccaccaaagttcggtgcatagataccgtactcaacggattcaataatttcctgcggggtgcttttacccggcagcatataggtgttggtcatacgcggcatgggcagatgggcgtaggattcacggcgaccgttgccagtcggcgtcatccccatcaaacgcgcgttgagtttatcctgcatgtagcctttcagaatgccgttctcaatcagcacgttgtactggcctggcgtaccttcgtcatcaatcgccacgctacctcggcgatcgaccatcgtgccatcatcaaccacggtacacagttcactagccaccagctccccgacctgtccactaaatacactagtgccacggcggttgaagtcgccttccagaccgtgaccaaccgcttcatgcaacagcacgcccggccaacctgcgccaagtactaccggcatggtgcccgctggtgcagcaacggcagaaagattgaccagcgccatacgcactgcttcttttgcccatgcatccgcacggacttcgccgtcgagatcggcaaggaagaattcataaccaaaacgaccgccgccgccactggcaccgcgttcgcgtttgccatcttcttcgacgagaacgctcacggaaagacgcaccagcggacggacatccgccgctagcgtgccgtcggtggccgcaaccaaaattaattcatagacaccactgaggctggcagtcacttcctgtacgcgcttgtccgcttcgcgggcaaccttatcgacgcgacgcaggatatccagcttctcttcacggctcatgctttgcagcggatctacgctggtatacaacgggctatgctctaccgcgcccagcgtctgtactttaccatcaccactatcacggacgatggtgcgcgccgcttgcgcactctgttccagcgccagcaggctgatttggtcagcgtaagcaaatccggttttttcaccgctgattgcacgcacaccaacgccctgatcgatgttgtaagaaccatctttaataatgcggtcttctaaaacccaggattcgtgatagctgctctgaaaatagagatcgccataatcaaggcgacgttcggccagttgaccgaggatcgcgaacaagtcctgatgtttcaggccgttcgccgctagcaattgttcacttaccaggttaagactcatcgtttttgctactcgttagttactgcagtagaggattttttacggctgccggatgcggcgtgaacgccctatccagcctacggttatgttccggtttgtaggcctgataagacgcacagcgtcgcatcaggcaacggctgtcggatgcggcgtaaacgccttatccgacctacggttatgttccgtttgtaggcctgataagacgcacagcgtcgcatcaggcaacggctgccggatgcggcgtaaacgccttatccgacctacggttatgttccgtttgtaggcctgataagacgcacagcgtcgcatcaggcaacggctgccggatgcggcgtgaacgccctatccgacctacggttatgttctggctcgttggcctttggcaacgattatcctatgagattggggcaattacgcgccctcgtcaaatcattgcgctttttctttacgcggttggcgcaacacttcgttgatttgcggatcgtccagcggaccgctaatgtgatagcgcaaaatggagactttgctccacagcggccccagcactttactggcggcaaacactgccgcgccaacaatggggttaaccgcaaaagccgcagccacgcccaccgtcgcagaaatctctggtgcgacaaccgcttccatattcaggtcgcgacgtaccagatttacgctccctttcatggcgatatccgcctccaggccatccaccagcgtgtcgtcggtgtgcataacgccgtctttaatccacgcggtgctgcgaatggagtcaaaatagaacccttcgccaaaagtgtctctgaaatcaaaacgcagcttacgcatcagggcatctacgctcaataagcgcagcaattgcccggcatgtccggtattgatttcggtaatttcgcctttacccagttgagtatgaatgatgccattcaacgtcgcttcatctggctgccagggtgctttgcgccagtgtaaatcgtaatccacattaaaactgctctggcgtatgggcgtcgtgacaccaaaaaattctgcggcggcatcaattttctgcccgcgcagttttcctttcaggctggtacgttcattccccggattattaacccattcaccatcggcagtaagccggctgaaaccagtatcaatcagtccattggtcagcgttaacgtatcgccagaaatggtgatatcactgtcaatgcgaccgaatttttgcccccagaaccagcactctgtgcatcgtatttgggcgtccggccagccacggaagttaatgcgctccgttgtcgggaaaggactactcggcgtactatcaccacgagttttcgccacgctcgggttgtaataaagatatttgatattcgccagccacggcgcgttattacgcatcgctagcgtggcgttgatttcacgcccttgcgcttcaaccagggtgccatttgccgtcggttggctaacaatactcaggttattccattgctgatttcccagactcaacataggcgtacgtaacgttatgtgttgtgggaaactcgctgcaccaccgacactctccgcagcgcctttctggaacagggccagccactcggcaccattcatcggcggcatattgagttcaacgccactttgttccggcaacggcgggagcgttttactgtctgccgcccaaatagcacgatcgagcgtcagcttttgaccgagcaaccagcggctattgaaatgattatccgcaccagcctgtccggttaattcaaagctgttgagattgccatcaaccttaacgtttaccgctagtggttcacccgcaggtttggctaacggactaggtaagtgactgctcacattctttagatcgccgttcagctctatgttataggtcgcaccagcatgataaggcagatcaatgcccactttaccatcccacgccacgctgccactcaatgcttcgttcaccgcttcaggcagaacgccggttttcgccggttgccagttaccgttgaggtttaccgctacctggtaggcttttgccccttctttggtggaaaaatccacgttcaacggctgattaaaccagcttgctgtcagtggttcactttgcagatcgctattgataaagctgaatttaccgctcaaatttttcagggtgctgtcgagtggtttgataaacagactgttattacgcagcgtcacttcacctttcgcggttaccagttcgccgttcagcgggatatcaagatgtaagcgagcattcacatcgccgtcgagctggagttcttgcagggtcgcacccagagaatctttcagcggtgtctcatcaaagtaagggccaacggctttacccggacctttaatgtcagcgtcaatcagcagtttttctttactgtagtcagggatcactgcggtaagattactcgcgcgcacgccgcccagattaacgccatcggttttcatccataaaccgtcgttaataaagtccagttcaatatcaaggttagttaatgcaggccagtccggctggaaggcaaacttcgcgttgcgcagcggcaccagcacttcaaactgaccttcgttgtgtttataggggaagagttgcggattgccaccataaaccagcgtcgcgttatccgcttcaccgccctgaatcgcgccacttaagtaatcaaccaggtctttacccatcaagttttccgggaaatagcgccaggcttgactaccatcatcggtactgatgccagccagaatacccagccagggttcatcgttagcaggttgcaggtaacgaaaaccgccgcgcgcatggacggctttggctttaacgtcaatattacgcccatccagctggaaacctttgttattgttcagccagcttatagttgcctggccgtcggcgatttctagtggcgcacggaataccgtttcgtaaggcatctttgcctgcttcatgctcgcggtaagcaaaccattttcaacgctgccggaaagcgtcccggagaagtgttccgcacccggtaataatttccattgcttccaggccagatcgctccagcttgcctgaaaacgggtcttgtctgccgcctgaagcgggatatccagcgccagagtgttaatcttgccgctcggttgtgtggagcgccaaacatcacccagtgcaggactaagtttcgcggccagcgggcgtatgccctccaggcctgccagctccagattactggcgcgaatccggagttcgtcactgcgtttattgtctttgccgccaacgtcctgttccggtatccaggccagcgtcaatgctccgctcggccagggtttgccgtccatcgtgatccgtgtatcgggaatagagaactgccagcccggattttcacgcgtaatatgcgcggtcagattatccacgctcagcgtatgcgtttgcttctcgcccaaccagctggcaccgccctgtttcagccagacgtcaccgccggttacatcgcctttgtcgatcgtcatccagccttcaagggagaactgtgccgtttccagcgcaatattgtcctgcatccatttaccgagccacggcttcaggtcgatgtcatccgcctggagccagacgcgaccattgcttaacaacccctcatcatcgcgcaaatccatgcgcacctgcatcacgccgtgctgtccggtaaggctggagaggcttaccaggccttccgcacggtgtcgacgtggatcgttcagccaggtgagttgtgggatcgccagctcggcgcgctgaccggatggcgtcaggaaactgacttcactgtcgcgaagatcgaaatggtcaaattgacgaagaaacagatcgctgatgtgactggcttccagactgtcatcactaccaccgctggtgataggagtgttggtgcgaaagcgcagctgccagaaagtgaggtcgcgaaactgccagcgcatatgtaacaggctctgccagacatccagcgccagagtaacgcgtttaacgctaaattcgccgccatcttttagttctgcacggatgtcgtgtgcttcaagcgtcgggccaaaattctgccagctggcactgagctgactggcttctaccggcatgccagtcgcggattctattttgttgaggatttccggacgccaggcgtcaagatgcggtaaagcaatacgcaggccgctaaccagcagggcagcgatcacaacgagcgcggctccagtaagcagtaaaatccccggcaatcgcctcacccgtcactccttgtctgctaaaaatgtgactcaaaaaccctttgccggatggcggcccagcatctgtttacatcattacgacgtcaaactgctcctggttatagagcggttcaatttgtactttaacctgtttgccaacgaaaatttccacttccgccaggctgtgactctcttcgcctttcaaggcttcagctactgccggagaagcatagaccaggaaacggtcggagtcgtaagcatggtggacacgaacaatctcgcgcatgatttcatagcataccgtttccacggttttcaccgttccgcgaccgtggcaggttgggcattcgttacacagtacgtgctcaatgctttcgcgggtgcgtttacgcgtcatctccaccagccccagcgcgctaaaaccattaacgctggttttcacccggtctttgctcaacgcctgctccaggctgtgcagcactcggcggcggtgatcttcattattcatatcgatgaaatcaataatgataatcccgcccagattacgcaaccgtaactggcgagcgatagcctgcgtcgcttcaatattggtattgaaaatggtgtcgtccagattgcgatgaccgacaaacgctccggtattgatgtccacggtggtcatcgcttcggtctggtcgataatgagataaccaccggatttcagttctactttgcgttccagcgctcgctggatttcgttttcgacatcaaagagatcgaaaatcggctggcgtcctgtgtaatgctccagcttgcttgtcatctcgggaatgtactcgctggtgaactcaagtaacgcttcgtaagtcaggcgactgtcaacgcgaatgcggtccagttcggcatcggcgaaatcacgcagaacacgctgcgccagcgccagttcgccgtacagctgataacgggtctgcgggcgttttttacgctccataactttggtccagacgcgtttcagataagcggcatcggaggccagttcagcctcgccaaccccttccgctgcggtacggatgataaacccgccctgctcgtcgcaatactctgcgaccacttttttcaggcgttcacgttcactttcgctttcaatacgttgggaaaccccaacgtgagaagcccctggcataaacaccagatagcgagaagggagcgtgatatcggtggtcaggcgcgcacctttagtgccaagcggatctttcaccacctgcaccatcagatcttgcccctgacgaaccagttcgctgatgtcgcgcaccgtgaattgcttttgttcttcacccgccacacattcggtgtgcggcatgatgtcggatgcatgaagaaacgcggctttatccagcccaatatctacaaaagccgcctgcatacccggaagtacacgacttacacgacccttgtagatattgcctactattccgcgtcgcgcctcacgttcaatatgaatttcctgcagaataccgccatcaatatacgccactcgcgtttcgctaggcgttacgtttactaacaattcagccgtcatgtttatcccttttctcacgcagtgcgttaaaattacttaataattcatacgtttcaaccagcggtaagccgactacggcgtgatagctgccatttatcttcctgacaaaacagccacccagcccctgaataccgtatgcacctgctttatctaacggttcatcgctggcgacatagcccgcgatgtcttcgtctgttaacgttctgaaagtcacatcggtgaccaccaggcaatcgagaatgtgctggctgtcggccaacgccactgctgtcatcacctgatgggtctgaccgcttaatttgcgcaacatctgcgccgcatgctctgcgtcgcgcggtttctccagcacttctccgttcaggataacgatagtatccgcacccagcaccgggagatccttcgccgtttgcgcgacacctgcccgtgctttctcgcgcgccagacgcacaacatactgctgcgcgctctcctgcggctgacgctgctcctcaatgcccgtaacaatacgttcaaaggtcacgccaagttgcgcaagtaactcctgacgacgcggagaaccggaagctaaatacagagaagtcatagaaacctttattgcactgcaaactgctgacggactttgcgcatcagcaagaaaatccacggccagagcaccccattgactacactactccagaacacttccggtctgaaagagacgttaatcactaaaaactctgcccagaaaacaataatatccaccaccaggctaagcaacatgacgaccagcgcctgctgccataatgcgaggttgcggaaaagctggtatttcagcgccaccaggtaagcaatgatgctcatcgccaatacgcgtacgccaagcgtgctgccgctgatcagatccagtatggcacccatcacaaaacctgtgcccacatttacgcgatgaggcaaggccaggatccaatacaacaagatgagtaacacccagtttggccggaaaacaatcaggttatccggccagggcatgatttgcagcaacagcgcaatgaggaaagagagccagattacccagcgtccctggctacgatagctcgccactattgccctcccggcgcacgttattgccctcccggcgcacgcgcaggcggttgagcaccactttgcggcggcgtagccctttgtggagagcgattagcagcaggctgtgtcggcgcagcaggcgcagtagctgcatttcctgtcgccggttgctgcggagtcggctgagcgatccccgttgccggttcaggtaactttggccccatcgcgtctgggctaggcaatacctgcggcatcatctgcatcagacgttcattagcaacacgatgcacctcttccggcgtcatcgggttagcgccgttacgatctgccccccacagcagcagcagataacgcaaacgttgcagccctgcagtcggacgcgcctgaatcacagtataagcgcgctgggtatcgagttttacggaagagacaaccgcgaccggatagccttccgggaaacgaccgcccagaccggaagtcaccagcacatcaccaacacgaatatccgtattcgccggcagatgctcaagctgcaaatcatccgtacaaccgttaccggctgcaattacgcggatatcgttgcgcagcacctggattggcagcgcgtgggtcgcatcacaaatcagcagcacgcgactggtcagtttagcgacggccaccacctgaccaacaacacctttgtcgctgatgaccggctggccttcataaacgccattaacgctacctttatcgataacaacttgatcgctataaggatcgttaaccgtggagataacctgagtcaccattttctgctcatcctgacgcagcggggaacccagcagctcgcgcagacgcgcgttctcctgtttgtattgtccaagcatcagcagttcactgtttttcagcaacagttcctgacgtaacgcccggttttcaagttctaattggtcacggctggccagcgtctggcttacgccatccagcaattcacgaggagcattggaaacaaagtagaaaggactgacggcggtatccatataagtacggatttgactgaacgtccccaggcggctgtcggcaataataatgccgagcgccaccagcaccgccagaataaggcgaatctgtaggctcgggccacggctaaaaattggcttcataagttatgcgtattctcgtatcagaccaggcagggtaaacagacacttcccctgcctgcatccgattactcttcgctgaacaggtcgccgccgtgcatgtcgatcatttccagcgctttgccgccaccgcgcgccacacaggtcagcgggtcttcagcaacaacgactggaatgccggtttcttccattaacaaacggtcaaggttacgcagcagtgcgccaccaccggtgagcaccatgccgcgctcggagatgtcggaagccagttccggcgggcactgttccagtgcaaccattaccgcgctcacaataccggtcagcggttcctgcagtgcttcgaggatttcattggagttcagggtaaaaccgcgtggaacaccttctgccaggttacggccacgaacttcgatttcacggacttcatcgcccggataagcgctaccgatttcgtgcttgatacgttctgcggtggcttcaccgatcagagaaccgtaattacgacgcacatagttgatgatagcttcgtcgaaacggtcaccaccaatgcgcacagaagaggagtaaaccacaccgttcaaggagataacagcaacttcagtggtaccaccaccgatatcaaccaccatagaaccggtcgcttcagaaaccggcaggccagcaccaattgcggcagccatcggttcttcaatcaggaagacttcacgggcaccagcgccctgcgcggattcacgaattgcgcggcgttcaacctgggtcgcgccaaccggcacacaaaccagaacgcgcgggcttggacgcataaagctgttgctgtgcacttgtttgatgaagtgctggagcattttttcagtcacgaagaagtcggcgataacgccgtctttcattgggcgaatggcagcaatattgcccggcgtacggcccagcatctgcttcgcgtcatgacctactgcagctacgcttttcggactaccggcacgatcctgacgaatggccaccacggaaggctcattcaatacgatgccttgtccttttacataaatgagggtattcgcagtacccaggtcaatggacaagtcattggaaaacatgccacgaaattttttcaacatactaagggataatcctgaaagctggggcggaaaagaaaatccgcttactttaccaaccacacgcagcagcgacaaggcgcaaaaatcatctgctacggtgaaaattagtgcagttcgtttcctttgttacaaatctctgcctgagtccagaaaggcttaatgcatcagcagcattcctcgcctgtttgcaaccgcgtaaggtcattcatctgcatatgtgctgcaacaatctggcgagcagacaagcacactcccatgagacgcagcgcgcattattctacgtgaaaacggattaaacggcaggttaaacgctgtatctttgactatattttttcacgttagtatcaagtggctgactggacgcgaaaaaatccccttgcccgcctgtaacaccgcgctgaatcagggtctgccactcgcttcggctacgcacgccggtggcgtaaacctgggtgctggtcccggagcaggcttccaccaggctttgaaccagcagctggttctccgttcgcttctcaatgtttctgaccagccccggatggagcttgagtaactcaacattaagttctttgatccaactggtacttaccagcgtcaaaccagcctggttgacggctacccgtacccctaaagcattcactaaacgaataacaggttgtaaacgactgatatgttgacctacatcggcctctgcaagttcaataattatgcgttttcgttgacttttttcacattgcattaacgtatcgcgcagccaacgctgaaaacgcgggcgaatcaggctctcaacggtaacctgaatcgccagattttcctctggccagtaacgcaatagtggaataagacggctgatttgcagacggtcatactcttcgcttaagccaaactgcaagaccatcggcatatgctccgcgctgctaacctcttcattaccatcgaagatgcggcacatgagttcgcgatgatgaacctgaccttcgcgagtaaccgccggtttttgataaaggcgcgggccgccgcgactgagcatttgctcgataagcgtacgccagcgaacattaccgcgtcctttttcaggcaagctgtcatcgtaaatagcccagctattgccgccctgcaatcccgcattacgcgtggcagactctgcatgttccattacctgctcggtatcctgaccactacgccaggcgcagataccaatgtggatcatatcgtcgcgatcgagcattttattgttcggcaaggtatcaacggctttgattaactgaccggcgatgctctctgcctcttttaacgtccggtgcggtaacagcgcagcaaaatcactgcggtggtaacgcgccagcagtgcgccagggtagcgcatcataaatgtgctcagcagattcgtcagagtgaagaactgttcttcaacctggctgtgcccccaggtatcgctcaacatattgaaatccggcagacgaatcatcatcacgatcccgtgggtacctactttctcctgatcttccagtaacgttgctaactgattatcgaaaaagagtcggttattgaggccggttttcacgtcctgggcggcataagagcggatcagcgtatcaagacggctgtgttgttcgcgtgcgttctgaatttcacgaagcagcgtatccagcgcactgctggttctgggcggccattcatagatggttcccaacacattagagccacgctcaccgtttaagatacgagtagcccgggtttccagcaattcttgcccggcaagttgccgttgtaaccagcgtaccgccaggaagagcataacaatgataaagccaatcgcccccgtgagcggcgcggtggtcatcaagctatggaaatagttgcccatcggatcctgataaaccagacgcaagctcatccccggatgctttatcaacggaacgctcagttcgcgaaacagatcgctggagccaactggacgataactaccatttctggccagggtataaacctgtttatcaccatggagcaggtctacacgaacgatatctgcgctcatcattaattcggtaatttgtggccttaatacgctgaagtcattgctcacaaggtgggtatcaatcgccgtcgccaccgcctgaacgcgatgactaaacttatactgaatggcgttgtagaaacttaggctacagcccagcaaagtcacaaaaattgttaacccggtgagcagcgtaacaaaggcgctaaatttcgtcgttaatctcatccttgtgttaactccgatagtgaggaagcgggcatactagcaaatcagatttatctcgcaatttattgcgcttcatcggctttgcttttccattagcgagtatagtcttcagaaattattttccaatccatcatgcacatgaggaccacttatgcaggcgttacttttagaacagcaggacggcaaaactctcgcaagtgtacagactctggacgaaagtcgcctgccggagggcgatgtcacggtcgatgttcactggagcagcctgaactataaagatgcgctggcgattaccggtaagggaaaaatcatccgtaattttccgatgattcctgggatcgattttgccggaactgtacgcaccagcgaagatccgcgttttcatgccggtcaggaggtgttactcactggctggggcgttggtgaaaaccactggggtgggctggcggagcaggcgcgagtgaaaggtgactggctggttgccatgccgcaagggctggacgcgcgtaaagcaatgattatcggtactgccggttttaccgccatgctgtgtgtgatggcgctggaagatgccggtgttcgcccgcaggacggggagattgtcgtgacgggtgccagtggtggcgtcggcagtaccgccgtggcgctgctgcataagttgggttatcaggtcgttgccgtttccggtcgcgaaagtacccatgaatatctgaaaagtttaggtgctagccgtgttctccctcgtgatgagtttgccgaatcccgtcctctggaaaaacaagtctgggctggggcaattgacaccgttggcgacaaagtgctggcaaaagtgctggcgcaaatgaattacggcggctgcgtggcggcctgtggtctggcgggtggttttactctgccaaccacggtcatgccatttattctgcgtaatgtccgtttgcaaggggtggatagtgtaatgacgccaccagaacgccgcgcacaagcctggcagcgactggtcgccgatttaccggaaagtttctatacccaggcggcaaaagagatatctctgagtgaggcaccgaactttgccgaggccatcattaataaccagatccagggtcgcacgctggtgaaggttaactaaccatttagcagggaataataagagagggaactcattttgaaatcattattcaatcggttaacgggaaaagcggttagccggacagctttcgtcgaacaccttggtcaggaagttatacaacatcatccaaactggaaagtcatgatttcgactgaccacaaattgatgcgcattgatactccactaaacagctattattgatacgcctccgtcgcctgttaggtttatgttgctttgcctgggcgacgctacgcttagccccttacttatttctggtaccatggggtgaataatctgattttgtttgactacaaattaatcactcgaacctatttaatgctgagcattgtcaatcggttaattttgcgtgctttagcattcacatctatccagacgatgcagtgaaaattgggtaatccccagcaaccgctgcgtaatgtcgtctatcttgtcgcgatcctggcatccctacattatttgtggtctgtgaagattatctcattgcagcccctcatcttcgcagggctggcttttcagcttttcaccttacgttataagaagttccgtcgatgatggcgctaatttcgtgaattgtgcggcttgttgcaaattacacggtgttgaaggttatttacatgttagctgttgattatcttccctgataagaccagtatttagctgccaattgctacgaaatcgttataatgtgcgacctcgtcctccctgacgcagtttttgcgctgcggaaaaggtgacattggcgcaacgaaggtatattttgttttttgccggaggatagcagcagatcgctgcacaatgtccgtcaagtctaacattgacactctggggcaaaatagaccggcgtcccggcctgctggaatttatcgctatgcatacagctgtcggggcatacgctttacagacggcggtgaaacgcctgtcacaatcacactaaacaaagagtacggaacccactcatggatattcgtaagattaaaaaactgatcgagctggttgaagaaagtggcatctccgaactggaaatttctgaaggcgaagagagtgtacgcattagccgtgcagctcctgccgcaagtttccctgtgatgcaacaagcttacgctgcaccaatgatgcagcagccagctcaatctaacgcagccgctccggcgaccgttccttccatggaagcgccagcagcagcggaaatcagtggtcacatcgtacgttccccgatggttggtactttctaccgcaccccaagcccggacgcaaaagcgttcatcgaagtgggtcagaaagtcaacgtgggcgataccctgtgcatcgttgaagccatgaaaatgatgaaccagatcgaagcggacaaatccggtaccgtgaaagcaattctggtcgaaagtggacaaccggtagaatttgacgagccgctggtcgtcatcgagtaacgaggcgaacatgctggataaaattgttattgccaaccgcggcgagattgcattgcgtattcttcgtgcctgtaaagaactgggcatcaagactgtcgctgtgcactccagcgcggatcgcgatctaaaacacgtattactggcagatgaaacggtctgtattggccctgctccgagtgtaaaaagttatctgaacatcccggcaatcatcagcgccgctgaaatcaccggcgcagtagcaatccatccgggttacggcttcctctccgagaacgccaactttgccgagcaggttgaacgctccggctttatcttcattggcccgaaagcagaaaccattcgcctgatgggcgacaaagtatccgcaatcgcggcgatgaaaaaagcgggcgtcccttgcgtaccgggttctgacggcccgctgggcgacgatatggataaaaaccgtgccattgctaaacgcattggttatccggtgattatcaaagcctccggcggcggcggcggtcgcggtatgcgcgtagtgcgcggcgacgctgaactggcacaatccatctccatgacccgtgcggaagcgaaagctgctttcagcaacgatatggtttacatggagaaatacctggaaaatcctcgccacgtcgagattcaggtactggctgacggtcagggcaacgctatctatctggcggaacgtgactgctccatgcaacgccgccaccagaaagtggtcgaagaagcgccagcaccgggcattaccccggaactgcgtcgctacatcggcgaacgttgcgctaaagcgtgtgttgatatcggctatcgcggtgcaggtactttcgagttcctgttcgaaaacggcgagttctatttcatcgaaatgaacacccgtattcaggtagaacacccggttacagaaatgatcaccggcgttgacctgatcaaagaacagctgcgtatcgctgccggtcaaccgctgagcatcaagcaagaagaagttcacgttcgcggccatgcggtggaatgtcgtatcaacgccgaagatccgaacaccttcctgccaagtccgggcaaaatcacccgtttccacgcacctggcggttttggcgtacgttgggagtctcatatctacgcgggctacaccgtaccgccgtactatgacagtatgatcggtaagctgatttgctacggtgaaaaccgtgacgtggcgattgcccgcatgaagaatgcgctgcaggagctgatcatcgacggtatcaaaaccaacgttgatctgcagatccgcatcatgaatgacgagaacttccagcatggtggcactaacatccactatctggagaaaaaactcggtcttcaggaaaaataagactgctaaagcgtcaaaaggccggattttccggccttttttattactggggatcgacaacccccataaggtacaatccccgctttcttcacccatcagggacaaaaaatggacactcgttttgttcaggcccataaagaggcgcgctgggcgctggggctgacccttttgtatctggcagtttggttagtagccgcttacttatctggcgttgcccccggttttaccggctttccgcgctggtttgagatggcctgcatcctgacgccgctgctgtttattggactgtgctgggcgatggtgaaatttatctatcgcgatatcccactggaggatgacgatgcagcttgaagtaattctaccgctggtcgcctatctggtggtggtgttcggtatcagcgtttatgcgatgcgtaaacggagcaccggcaccttccttaatgagtatttcctcggcagccgctctatgggcggtattgtgctggcgatgacgctcaccgcgacctatatcagtgccagtagctttatcggcgggccaggagctgcttataaatacgggctgggctgggtattgctggcgatgattcagcttcctgcagtctggcttagtctcggtattctcggcaagaagtttgcgattcttgcgcgccgctacaatgcagtgacgctgaacgatatgctgtttgcccgctaccagagtcgtcttctggtgtggctggcgagtttgagtttgctggttgcgttcgttggtgcgatgaccgtgcagtttatcggcggtgcgcgcctgctggaaaccgcggcgggtattccttatgaaaccgggctgctgatttttggtatcagcattgcgttatataccgcctttggtggctttcgcgccagcgtgctgaacgacaccatgcaagggcttgtgatgctgattggcaccgttgtgctgcttattggcgtagtacatgccgctggcggcttaagtaacgcagtacagaccttgcaaaccatcgatccgcaactggttacgccacaaggcgctgacgatattctgagccctgcctttatgacgagcttctgggtactggtgtgttttggcgtgattggcctgccgcatactgcggtgcgctgtatctcttataaagacagcaaagccgtacatcgggggatcatcatcggtacgattgtggtcgcaattctgatgttcggtatgcacctggccggagcgttaggtcgggcggtgatccccgatctcaccgtaccggacctggtgatcccaacgttaatggtaaaagtgctgccaccgtttgctgccgggatcttcctggctgcaccgatggctgcgatcatgagcacaattaacgcccaactgctgcaaagttccgctacgatcattaaagatctctatctgaatatccgtccggatcaaatgcaaaacgagacgcgtctgaagcggatgagcgcggtaattacgttagttctcggcgcgttgctgctgcttgccgcctggaagccgccagaaatgatcatctggctgaatttgttggccttcggtgggctggaagccgttttcctgtggccgctggtgctgggtctttactgggaacgcgccaacgccaaaggcgcgctaagtgcgatgatcgttggcggcgtgctgtatgccgtactcgcgacgctgaatattcagtacctgggcttccaccctatcgtgcccagcttactactaagtttgctggctttcctggtcggaaaccgtttcggtacatccgtcccgcaagctaccgttttgactactgataaataaagagttttgccatgccttggatccaactgaaactgaacaccaccggcgcgaacgcggaagatcttagcgatgcgctgatggaagcgggtgccgtttctatcacttttcaggatacccacgatacgccagtatttgaaccgctgccgggcgaaacgcgcctgtggggcgacaccgatgtgattggtctgttcgacgctgaaaccgatatgaacgacgtggtggcgattctggaaaaccatccgctgctcggcgcaggcttcgcgcataaaatcgaacaactagaagataaagactgggagcgcgaatggatggataatttccacccgatgcgctttggtgaacgactgtggatctgccctagctggcgtgatgtgccggacgaaaacgccgtcaacgtgatgttagatccagggctggcgtttggtacgggtacccatccaaccacctctctgtgcctgcaatggctcgacagcctcgatttaaccggtaaaacagtcatcgactttggctgtggttccggcattctggcgatcgcggcgctgaaactgggtgcagcaaaagccattggtattgatatcgatccgcaggcgattcaggccagccgcgataacgccgaacgtaatggcgtttctgaccgtctggaactctacttaccgaaagatcagccagaagaaatgaaagccgacgtggtggtcgctaacatccttgcaggcccattacgtgaactggcaccgttaatcagcgtcctgccggttagtggcggtttgctgggcctttccggtattctggcaagccaggcagagagcgtttgtgaagcttatgccgatagcttcgcactggacccggtcgtggaaaaagaagagtggtgccgtattaccggtcgtaagaattaaccttcgcatcgccgtagggtgacgcggggcgaagtgcgagcaagctcacaaaaggcacgtaaatttgccgattatttacgcaaatttgcgtgccaaaattttcattcataaagaaaaattgagaacttactcaaatttctttgagtgtaaattttagtcactattttctaatatgatgatttttatgagtaattatcgcaccacgctcattttaaatgcaattctttgatccatctcagaggattggtcaaagtttggcctttcatctcgtgcaaaaaatgcgtaatatacgccgccttgcagtcacagtatggtcatttcttaactcatgcgcatcggacaatatcagctcagaaatcgcctgatcgcagcgcccatggctggcattacagacagaccttttcggacgttgtgctacgagatgggagccggattgacagtatccgagatgatgtcttctaacccacaggtttgggaaagcgacaaatctcgtttacggatggtgcacattgatgaacccggtattcgcaccgtgcaaattgctggtagcgatccgaaagaaatggcagatgcagcacgtattaacgtggaaagcggtgcccagattattgatatcaatatgggttgcccggctaaaaaagtgaatcgcaagctcgcaggtagtgccctcttgcagtacccggatgtcgttaaaagcatccttaccgaggtcgtcaatgcagtggacgttcctgttaccctgaagattcgcaccggctgggcaccggaacaccgtaactgcgaagagattgcccaactggctgaagactgtggcattcaggctctgaccattcatggccgtacacgcgcctgtttgttcaatggagaagctgagtacgacagtattcgggcagttaagcagaaagtttccattccggttatcgcgaatggcgacattactgacccgcttaaagccagagctgtgctcgactatacaggggcggatgccctgatgataggccgcgcagctcagggaagaccctggatctttcgggaaatccagcattatctggacactggggagttgctgcccccgctgcctttggcagaggttaagcgcttgctttgcgcgcacgttcgggaactgcatgacttttatggtccggcaaaagggtaccgaattgcacgtaaacacgtttcctggtatctccaggaacacgctccaaatgaccagtttcggcgcacattcaacgccattgaggatgccagcgaacagctggaggcgttggaggcatacttcgaaaattttgcgtaaacagaaataaagagctgacagaactatgttcgaacaacgcgtaaattctgacgtactgaccgtttctaccgttaactctcaggatcaggtaacccaaaaacccctgcgtgacagcgttaaacaggcactgaagaactattttgctcaactgaatggtcaggatgtgaatgacctctatgagctggtactggctgaagtagaacagcccctgttggacatggtgatgcaatacacccgtggtaaccagacccgtgctgcgctgatgatgggcatcaaccgtggtacgctgcgtaaaaaattgaaaaaatacggcatgaactaattcaggttagctaaatgcttgattaaaaaggcgctactcggcatggggaagcgccttttttataggtgtcacaaagggagtgaccatgagaacaggatgtgaaccgacccggtttggtaatgaagctaagaccattattcacggtgatgcgcttgccgaacttaaaaagatccccgccgaaagtgtcgatctgatctttgccgacccaccatataacatcggtaaaaattttgatggtctgatcgaagcctggaaagaagatctgtttatcgactggctgtttgaagtgattgcagagtgccaccgcgttctgaaaaagcagggcagcatgtacatcatgaacagtacggaaaacatgccctttatcgatctccagtgccgcaagctttttaccatcaaaagtcgcatcgtctggagttatgacagttctggagtgcaggcgaaaaaacactacggctccatgtacgaacccatcctgatgatggtgaaagacgcaaagaactacacattcaacggtgatgctattctggtagaagccaaaaccggaagccagcgcgcgttgatcgattatcgcaaaaatcctccacagccttacaatcatcaaaaagtaccgggtaacgtttgggattttccgcgcgtgcgttatttgatggatgaatatgaaaaccacccgacgcaaaaaccggaagccttactgaaacgcattattctcgcctcttccaacccaggcgatatcgttctcgacccgtttgctggtagctttactaccggtgccgtagccatcgccagcggacgaaaattcattggtattgagatcaacagcgagtacatcaaaatggggcttcgacggctggatgtcgcgagccattactctgcggaagaactggcgaaagtgaaaaaaagaaagaccggcaacctgagtaaacgaagccggttaagcgaagttgaccccgatctcattacaaagtaaaggatgtgtaagcctggttttcagattattcatttcgtgtatatttcctgccagacttggttaaacatgcacaggctcaggtaatgattcgcaagtattggtggctcgtcgttttcgctgtcttcgtttttctgtttgatactttactgatgcagtggattgaactgctggcaacagaaacagacaaatgccgcaatatgaacagtgttaatccactaaaactggttaactgtgacgaactgaattttcaggacagaatgtgaatttacatgacacttaattcattcgtttgatgaattaatttcgttatgttttcatctggcatgaacattcttaatacgttatcgaccagagcgggggcttgtttataaagatcataacccgccatattcattaaccagttttgaacaattccgctgaaggcaccatcaataataatcatcacaacatctaaatcgaggttatttgctacacaaccttgttgctgacacgcctgcaatacttcgcggagagtctgcggattaaagcccatcttttcgcgtatcactccctcggccagcatctcatcattaaattcacatttgtgatataagattttcagcaacgcctgctggcggggaattttggcaatatattgcaagccgacaatcaatttttcacgcaattgttgaaacgggtcatgctctaatccagccgtcaagtgttcctggattaactcccgcaaactaggctgttgcaaccacatctcattaaacagttgagtcttgttttcgaagtgccagtagatagcgccacgcgtaacgttagcggcgtcggcaatgtcgttgagcgtcgtcttgcttacgccatgctgcgcaaactgggcgatggcagtttcaatcagttcttgccgggtcttcagagcttcggctttggttctttttgccatgattaattattcaggaaataaatatattcgacacagagtgagaaaatagcgaaggttaatctatcacctaatgtgtatttatacgagaggctaatattgagttgctataaatcgttaaataaataatatatattatttacctaagatacattcactacatcaatatatatttcaatttacgaggttttaattctgcctctttcaacccgcgtcaaaataaaacagtagaatattaatctttttttgtgtttatgtgccttgagatgcctgtattcataactattccttacatcgacgaatgataatttgtaggatagcgaactgtatttttctttctgcgagttaacgcgttgcctttttgggtaaataacgcgcttttggttttttgaggaatagtaatgacgaaacatgccaggtttttcctcctgccctcctttattctgatctccgcggctttaatcgccggttgtaacgataagggagaagagaaagctcacgtcggtgaaccgcaggttaccgttcatattgtaaaaacggccccgttagaagttaagactgaattaccaggccgcaccaatgcttatcgtatagccgaagttcgcccacaggttagcgggatcgtactgaatcgcaatttcactgaaggcagcgatgtgcaagcaggccagtccctgtaccagatcgatcccgcgacctatcaggcaaattatgacagcgcgaaaggcgaactggcgaaaagtgaagccgccgccgccatcgcgcatttgacggtaaaacgttacgttccgctcgtgggtacgaaatacatcagccagcaggagtacgaccaggccattgctgatgctcgtcaggccgatgccgccgtgattgccgcaaaagccacagtcgaaagcgctcgcatcaatcttgcttataccaaagtcactgcgccaattagcggacgtatcggcaaaagcactgtgaccgaaggcgctcttgtcactaatgggcaaacgactgaactggcgactgtccagcagctcgatcctatctacgttgatgtgacccaatccagcaacgattttatgaggctgaagcaatccgtagagcaaggaaatttgcataaggaaaacgccaccagcaacgtagagttggtcatggaaaacggtcaaacctatcccctgaaaggtacgctgcaattctccgatgtgaccgttgatgaaagcaccggctccataaccctacgtgctgtcttccctaacccgcaacatacgcttttgccgggtatgtttgtgcgtgcacggattgatgaaggcgtccaacctgacgccattcttatcccgcaacaaggcgttagccgcacaccgcgtggtgatgcaaccgtgctgattgttaacgataaaagtcaggttgaagcgcgccctgtcgttgccagtcaggcgattggcgataaatggttgattagtgaaggactgaaatctggcgatcaagtcattgtcagcggcctgcaaaaagcgcgtccgggagagcaggttaaagccactaccgatacccccgcagatactgcaagcaagtaaggtaatctgacatggcaaacttttttattcgacgaccgatatttgcatgggtgctggccattattctgatgatggcgggcgcactggcgatcctacaattgcccgtcgctcagtatccaacaattgcaccgcctgcggtttctgttagtgcaaactatccgggcgctgatgcgcagaccgtgcaggatacggtgacgcaggttatcgaacagaatatgaacggtatcgataacctgatgtatatgtcctccaccagcgattccgccggtagcgtgacaattacccttaccttccagtccgggaccgatcctgatatcgcgcaagtgcaggtgcagaacaaactccagctcgccacgccgttgctgccgcaggaggttcagcagcaggggatcagtgttgaaaagtccagtagcagctatttgatggtggcgggctttgtctctgataacccaggcaccacacaggacgatatcagcgactatgtggcctctaacgttaaagatacgcttagccgtctgaatggcgtcggtgacgtacagcttttcggcgcacagtatgcgatgcgtatctggctggatgccgatctgctaaacaaatataaactgacaccggttgatgtgattaaccagttgaaggtacagaacgatcagatcgctgccggacagttgggcggaacgccagcgttaccagggcaacaattgaacgccagcattattgctcagacgcggtttaaaaatccggaagaattcggcaaagtgaccctgcgcgtaaacagtgacggcagcgtggtacgcctgaaagatgtcgcacgggttgaacttggcggtgaaaactataacgttatcgctcgtatcaacggaaaaccggcggcgggcctggggattaagctggcaaccggcgcgaatgctctcgataccgcgaaagccattaaggcaaaactggcggaattacagccattcttcccgcagggaatgaaggttctctacccttatgacaccacgccattcgtccagctttctattcacgaagtggtaaaaacgctgttcgaagccattatgctggtgttcctggtgatgtatctgttcttgcagaatatgcgagcaacgctgatccccgccattgcggtacccgtggtgttgttagggacgtttgccatcctcgccgcttttggttactccatcaacacactaacgatgttcgggatggtgcttgccatcgggctgctcgtcgatgatgcgatagtggtggtggagaacgtcgagcgcgtgatgatggaggataagctcccgccaaaagaagcgacggaaaaaagcatgagccaaattcagggcgcactggtgggtatcgcgatggtgctgagtgcggtatttattccgatggcattcttcggcggttctactggggcaatttatcgccagttctctatcaccatcgttagcgcaatggcgctttctgttctggtggcattgattcttacccctgcgttatgtgcaacgctgcttaaacccgtctctgctgagcatcacgaaaataagggcggtttcttcggttggtttaataccaccttcgatcatagcgttaaccactacaccaacagcgtcggcaaaatcctcggatccacaggacgatatttactgatctatgcgctgattgttgcaggaatggtggtgttgtttttacgtcttccgtcttccttcttacctgaagaggatcagggtgtctttctgaccatgattcagttacccgctggcgcgacgcaagagcggacgcaaaaagtgttggatcaagttacggattactatctgaagaacgagaaagcgaacgttgaaagtgtctttacggttaacggctttagcttcagcggccaggcacaaaacgccggtatggccttcgtcagtctgaaaccgtgggaagagcgtaatggtgacgaaaacagtgcggaagcggtaatccatcgtgccaaaatggaattgggcaagatccgcgacggttttgtcattccattcaatatgccagccattgttgaactgggcacggcaacgggtttcgactttgagttaattgatcaggctgggctgggtcacgatgccctaacccaggcccgtaaccagttgcttggtatggcggcgcaacatcctgccagcttagtcagcgtgcgccctaatggcctggaagacaccgcgcagtttaaactggaagttgaccaggaaaaggcgcaggcattaggtgttagtctttctgacatcaatcagaccattagtacggcgctgggtgggacttacgttaacgacttcatcgaccgtggccgcgtgaaaaagttgtatgttcaggcggatgccaaattccgtatgctgccagaagatgtcgataaactttatgtccgcagcgccaacggcgaaatggtgccattcagcgcctttaccactagtcattgggtgtatggctctccgcgactggaacgctacaacggtctgccgagtatggagattcagggggaagccgcgccaggaaccagttccggcgatgccatggcgttgatggaaaaccttgcgagtaaattacctgcgggcattggttatgactggacgggtatgagctatcaggaacgcttaagcggaaaccaggctcccgctctggtagcaatttcctttgtggttgttttcctgtgccttgctgcactctatgaaagctggagtattcctgtcagcgttatgttggtagtgccgttagggattgtcggcgtgctgctggcggcgacactctttaatcaaaaaaatgacgtctactttatggtgggcttgctaacgacaattggcttgagcgccaaaaacgctattttgatcgttgagttcgctaaagatctcatggagaaagagggtaaaggtgttgttgaagcgacactgatggcagtacgtatgcgtctgcgtcctatcctgatgacctctctcgcctttattctcggcgtattaccgctagctatcagtaacggtgccggcagtggcgcgcagaacgctgtgggtatcggggtaatgggaggaatggtctctgcaacgttgctggcaatcttcttcgtaccggtgttctttgtggtgatccgccgttgctttaaaggataaatcagaaacataaaggcgctttcgggtgcctttattatttccagtgaaacccataaaaattaataagatattcttctgctcactctttaaaagctttctatagttcccgctcccttcactatttttacaattcacataatttgtcattattcattccgcaagatttataacctccggtgataaaatggcattcagctcgttaataagagagttaacttattaagcgttagcgtttattactgaggtaacaccatgaaaagattaattcctgtggcattgctcaccgcattgctggcgggctgtgctcacgatagcccctgcgttccggtttatgacgatcagggtcgtctggttcacaccaatacctgtatgaaaggcacgactcaggataactgggaaacggctggggctattgccggcggggcagctgctgttgctggcctgacgatggggatcatcgctctaagcaaataactgaacagggcgcggagttccgcgctctttttaacgatacagtatctctccataagataaaatattgctatattctgctgggtaattccctgctgatttagcatgttacatcgcgttatttcgctgctttcgaaataacgcatcaatttaattttcacacttcccaccagaaatatactcacgctaacaatcattattctgcttagtaaaacacgcgtaaatattttgcgccaaaatgtggcgcatgtttcattttcgcaccattgcggggcgctgtttttattatttcctgtctacactcagcttattgcgacgcgaaatcgtgcgcaaaagctggcactacttttgcttataagaggatggccacagacaggtaaaagacgtttcccaaacgtcctataacgataattttcgcctcacaggaagcattatgaaaaagatgatgatagccacactggctgccgccagcgtgctgcttgccgttgcaaatcaggcgctgctggcgcgacgcttgatgccgttcagaaaaaaggttttgtgcaatgcgggatcagtgatggattacctgggttctcttatgccgatgctgacggtaagtttagtggtattgatgttgatatttgtcgtggtgttgccgctgctgtatttggtgacgacacgaaagtgaaatataccccgctcactgcaaaagaacgcttcaccgctttacagagtggggaggtggatttgctctcccgtaatacgacctggactagttctcgcgatgccgggatgggaatggcatttaccggcgtcacttattacgacggcattggcttcctgacgcacgataaagcggggctaaaaagcgcgaaagaactggatggcgctaccgtctgtattcaggcgggtactgataccgaactcaacgtcgccgactacttcaaggcaaacaatatgaagtacacaccggtgactttcgatcgctctgacgaaagtgcgaaggcactggaatctggtcgctgcgatacgctggccagcgatcaaagtcaactgtatgccctgcgcatcaaattaagcaacccagctgaatggattgtcttaccggaagttatcagtaaagaaccgcttggtccggtagttcgtcgtggcgatgatgaatggttcagcattgtacgctggacgcttttcgccatgctgaatgctgaagagatgggcatcaattcccagaacgtcgatgaaaaagcggctaatccagcaacgcctgatatggcacatctgctgggtaaagaaggcgattacggcaaggatctgaagctggataataaatgggcctataacatcatcaaacaggtgggtaactacagcgaaatttttgagcgtaacgtaggtagtgaaagcccgctgaaaattaaacgtgggcaaaataatctctggaataacggcggtattcagtacgcaccgcccgtgcgttaagtcggtgtgaggtaacgagcgtcgctacggcggcgctctcttcagcgttatgctttccgaggtttctatgtctcatcgccgcagtaccgttaaaggcagtctctcttttgccaaccctacggttcgcgcctggttattccagatccttgccgttgttgctgttgtcggcattgttggttggttatttcacaacactgtaacgaatctcaataatcgtggcattactagtggttttgcctttctggatcgcggcgctggcttcggtattgtccagcatttgatcgattaccagcagggcgacacctacggacgcgtttttattgtcggcttactcaatacgctactggtttctgcattgtgtattgtgttcgcttctgttttgggcttctttatcggtctggcgagacttagcgataactggctgctacgaaagctttccacaatttatattgagatcttccgtaatattcccccgctgctgcaaatcttcttctggtactttgccgtgttgcgcaatttgcccggaccacgccaggctgtgagcgcgtttgatctggcctttttgagcaatcgtgggctttatattccgagtccgcagctgggagacggatttattgcgtttatcctggctgttgttatggctatagtcctttctgttgggctattccgctttaataaaacataccagataaagaccggacaactgcgccgcacctggccgatcgccgcagtgttgatcattggtttgcctttactggcgcaatggctttttggcgcagcactacactgggatgtcccagccctacgaggctttaacttccgcggcgggatggttttaattcctgaactggcagccttaacgctggcacttagcgtttatacatctgcatttatcgccgagattatccgcgctgggatccaggcagtgccttatggtcaacatgaagcggctcggagtctgggattacccaacccggttacgctacgccaggtcattattccccaggcattgcgggtgattattccaccgttaaccagccagtatctcaacatcgtcaaaaactcctctcttgccgccgctattggctatcccgatatggttagcctgtttgccggcaccgtgctgaatcagacggggcaagccatcgagacgatagccatgaccatgagcgtctatctgattatcagcctgactatcagcctgctgatgaatatctataaccgccgcatcgcgatcgttgaacgctaaggagtcatgatgacaaaagtattgctgtctcatcccccgcgcccggcgagccataacagtagccgcgcgatggtgtgggtgcgaaaaaatctgttctccagctggagcaatagcctgctgactattggctgcatatggttgatgtgggaactgatcccaccgttgctgaactgggcatttttgcaggctaactgggttggcagtacgcgtgccgactgcacaaaagccggtgcctgttgggtcttcatccacgaacgatttggtcagtttatgtatgggctttacccacacgaccaacgctggcgaattaacctcgcattactgattgggcttgtgagcatcgcaccaatgttctggaaaatactcccgcatcgcggtcgctatattgcggcctgggcggtgatttacccactgattgtctggtggctgatgtatggcggtttttttgctcttgagcgggttgaaacccggcaatggggcgggctgacgctaactttaattattgcaagtgttgggattgcgggggcgctaccgtgggggatcttactggcgttaggtcgccgctcccatatgccgattgtgcgtatcttaagcgtcatttttatcgaattctggcgcggcgtgccgctgattaccgttctgtttatgtctagcgtcatgctgccgttgtttatggcagaaggcaccagtatcgacaaattgatccgcgcgctggttggcgtgatcctgtttcagagtgcatatgttgcggaagtcgtgcgaggtggattacaggcgctgcctaaagggcaatatgaagcggcagagagcctggcgttgggttactggaaaactcaggggctggttattctgccacaggcgttgaagctggtaattcctgggctggtaaataccatcatcgcactcttcaaagataccagcctggtgatcattatcgggttgttcgatcttttcagtagcgttcagcaggcaaccgttgatcccgcctggttgggtatgagcacggaagggtatgttttcgccgcgctgatctactggatcttctgtttcagcatgagccgctatagccagtatctggaaaaacgttttaacaccgggcgtacaccgcattgaggacactatgagccaaattttactgcaacctgctaacgcgatgattacgctggaaaacgtcaataaatggtatggacaattccatgttttgaaaaatataaatttaaccgtgcaaccgggagaacggatcgttctgtgtggccctagtggttccggtaaaagcacaaccattcgttgtattaatcatctggaagaacatcaacagggacggatcgtggtagatggcatcgaacttaatgaagatatccgcaatattgagcgcgtcaggcaggaagtgggaatggtctttcagcatttcaatctcttccctcatctgaccgttttacagaactgtaccctggcaccgatttgggtacgcaagatgcctaagaaagaggctgaagatctggcggtgcattacctagagcgggtgagaattgccgaacatgcgcataagtttcccggacagattagtggtggtcagcagcaacgcgttgccattgcgcgtagcctgtgtatgaagccgaaaattatgttgtttgatgagccaacgagcgcgctcgatcctgagatggtgaaagaggtgctggatacgatgattgggctggcgcagagcggtatgacaatgttgtgtgtaacacatgagatggggtttgcacgaaccgtcgctgaccgggtaatttttatggatcgtggggaaatagtggagcaagctgcacctgatgaattttttgcgcatcctaaaagtgagcgtacgagggcatttttaagccaggtaatccattaattgaatgttagttcgaaaagcaaaaaggccatcctttcggatggcctttcgcttgatttgatgtctggcagtttatggcgggcgtcctgcccgccaccctccgggccgttgcttcgcaacgttcaaatccgctcccggcggatttgtcctactcgggagagtgttcaccgacaaacaacagataaaacaaaaggcccagtcttccgactgagccttttgttttatttgatgtctggcagttccctactctcgcatggggagaccccacactaccatcggcgctacggcgtttcacttctgagttcggcatggggtcaggtgggaccaccgcgctactgccgccagacaaattcttttctaatctgccgaactttaacctaaaaagtggtgctgatacccagagtcgaactggggacctcacccttaccaagggtgcgctctaccaactgagccatatcagcacgctaaatttgatgcctggcagttccctactctcgcatggggagaccccacactaccatcggcgctacggcgtttcacttctgagttcggcatggggtcaggtgggaccaccgcgctacggccgccaggcaaattctgttttatcagaccgcttctgcgttctgatttaatctgtatcaggctgaaaatcttctctcatccgccaaaacagcttcggcgttgtaaggttaagcctcacggttcattagtaccggttagctcaacgcatcgctgcgcttacacacccggcctatcaacgtcgtcgtcttcaacgttccttcaggacccttaaagggtcagggagaactcatctcggggcaagtttcgtgcttagatgctttcagcacttatctcttccgcatttagctaccgggcagtgccattggcatgacaacccgaacaccagtgatgcgtccactccggtcctctcgtactaggagcagcccccctcagttctccagcgcccacggcagatagggaccgaactgtctcacgacgttctaaacccagctcgcgtaccactttaaatggcgaacagccatacccttgggacctacttcagccccaggatgtgatgagccgacatcgaggtgccaaacaccgccgtcgatatgaactcttgggcggtatcagcctgttatccccggagtaccttttatccgttgagcgatggcccttccattcagaaccaccggatcactatgacctgctttcgcacctgctcgcgccgtcacgctcgcagtcaagctggcttatgccattgcactaacctcctgatgtccgaccaggattagccaaccttcgtgctcctccgttactctttaggaggagaccgccccagtcaaactacccaccagacactgtccgcaacccggattacgggtcaacgttagaacatcaaacattaaagggtggtatttcaaggtcggctccatgcagactggcgtccacacttcaaagcctcccacctatcctacacatcaaggctcaatgttcagtgtcaagctatagtaaaggttcacggggtctttccgtcttgccgcgggtacactgcatcttcacagcgagttcaatttcactgagtctcgggtggagacagcctggccatcattacgccattcgtgcaggtcggaacttacccgacaaggaatttcgctaccttaggaccgttatagttacggccgccgtttaccggggcttcgatcaagagcttcgcttgcgctaaccccatcaattaaccttccggcaccgggcaggcgtcacaccgtatacgtccactttcgtgtttgcacagtgctgtgtttttaataaacagttgcagccagctggtatcttcgactgatttcagctccacgagcaagtcgcttcacctacatatcagcgtgccttctcccgaagttacggcaccattttgcctagttccttcacccgagttctctcaagcgccttggtattctctacctgaccacctgtgtcggtttggggtacgatttgatgttacctgatgcttagaggcttttcctggaagcagggcatttgttgcttcagcaccgtagtgcctcgtcatcacgcctcagccttgattttccggatttgcctggaaaaccagcctacacgcttaaaccgggacaaccgtcgcccggccaacatagccttctccgtccccccttcgcagtaacaccaagtacaggaatattaacctgtttcccatcgactacgcctttcggcctcgccttaggggtcgactcaccctgccccgattaacgttggacaggaacccttggtcttccggcgagcgggcttttcacccgctttatcgttacttatgtcagcattcgcacttctgatacctccagcatgcctcacagcacaccttcgcaggcttacagaacgctcccctacccaacaacgcataagcgtcgctgccgcagcttcggtgcatggtttagccccgttacatcttccgcgcaggccgactcgaccagtgagctattacgctttctttaaatgatggctgcttctaagccaacatcctggctgtctgggccttcccacatcgtttcccacttaaccatgactttgggaccttagctggcggtctgggttgtttccctcttcacgacggacgttagcacccgccgtgtgtctcccgtgataacattctccggtattcgcagtttgcatcgggttggtaagtcgggatgacccccttgccgaaacagtgctctacccccggagatgaattcacgaggcgctacctaaatagctttcggggagaaccagctatctcccggtttgattggcctttcacccccagccacaagtcatccgctaatttttcaacattagtcggttcggtcctccagttagtgttacccaaccttcaacctgcccatggctagatcaccgggtttcgggtctataccctgcaacttaacgcccagttaagactcggtttcccttcggctcccctattcggttaaccttgctacagaatataagtcgctgacccattatacaaaaggtacgcagtcacacgcctaagcgtgctcccactgcttgtacgtacacggtttcaggttctttttcactcccctcgccggggttcttttcgcctttccctcacggtactggttcactatcggtcagtcaggagtatttagccttggaggatggtccccccatattcagacaggataccacgtgtcccgccctactcatcgagctcacagcatgtgcatttttgtgtacggggctgtcaccctgtatcgcgcgcctttccagacgcttccactaacacacacactgattcaggctctgggctgctccccgttcgctcgccgctactgggggaatctcggttgatttcttttcctcggggtacttagatgtttcagttcccccggttcgcctcattaacctatggattcagttaatgatagtgtgtcgaaacacactgggtttccccattcggaaatcgccggttataacggttcatatcaccttaccgacgcttatcgcagattagcacgtccttcatcgcctctgactgccagggcatccaccgtgtacgcttagtcgcttaacctcacaacccgaagatgtttcacttcagagttgcgaaaatttgagagactcacgaacaactttcgttgttcagtgtttcaattttcagcttgatccagatttttaaagagcaaaacttcgcagtgaacctttgcaggtacactctgaagtattttttatttaatcactacagagatggtggagctatgcgggatcgaaccgcagacctcctgcgtgcaaagcaggcgctctcccagctgagctatagccccataacatgtagttaaaacctcttcaaatttgccgtgcaaatttggtaggcctgagtggacttgaaccaccgacctcacccttatcaggggtgcgctctaaccacctgagctacaagcctgtagaggttttactgctcattttcatcagacaatctgtgtgagcactgcaaagtacgcttctttaaggtaaggaggtgatccaaccgcaggttcccctacggttaccttgttacgacttcaccccagtcatgaatcacaaagtggtaagcgccctcccgaaggttaagctacctacttcttttgcaacccactcccatggtgtgacgggcggtgtgtacaaggcccgggaacgtattcaccgtggcattctgatccacgattactagcgattccgacttcatggagtcgagttgcagactccaatccggactacgacgcactttatgaggtccgcttgctctcgcgaggtcgcttctctttgtatgcgccattgtagcacgtgtgtagccctggtcgtaagggccatgatgacttgacgtcatccccaccttcctccagtttatcactggcagtctcctttgagttcccggccggaccgctggcaacaaaggataagggttgcgctcgttgcgggacttaacccaacatttcacaacacgagctgacgacagccatgcagcacctgtctcacggttcccgaaggcacattctcatctctgaaaacttccgtggatgtcaagaccaggtaaggttcttcgcgttgcatcgaattaaaccacatgctccaccgcttgtgcgggcccccgtcaattcatttgagttttaaccttgcggccgtactccccaggcggtcgacttaacgcgttagctccggaagccacgcctcaagggcacaacctccaagtcgacatcgtttacggcgtggactaccagggtatctaatcctgtttgctccccacgctttcgcacctgagcgtcagtcttcgtccagggggccgccttcgccaccggtattcctccagatctctacgcatttcaccgctacacctggaattctacccccctctacgagactcaagcttgccagtatcagatgcagttcccaggttgagcccggggatttcacatctgacttaacaaaccgcctgcgtgcgctttacgcccagtaattccgattaacgcttgcaccctccgtattaccgcggctgctggcacggagttagccggtgcttcttctgcgggtaacgtcaatgagcaaaggtattaactttactcccttcctccccgctgaaagtactttacaacccgaaggccttcttcatacacgcggcatggctgcatcaggcttgcgcccattgtgcaatattccccactgctgcctcccgtaggagtctggaccgtgtctcagttccagtgtggctggtcatcctctcagaccagctagggatcgtcgccttggtgagccgttaccccaccaacaagctaatcccatctgggcacatccgatggcaagaggcccgagggtccccctctttggtcttgcgacgttatgcggtattagctaccgtttccagtagttatccccctccatcaggcagtttcccagacattactcacccgtccgccactcgtcagcgaaacagcaagctgtttcctgttaccgttcgacttgcatgtgttaggcctgccgccagcgttcaatctgagccatgatcaaactcttcaatttaaaagtttgatgctcaaagaattaaacttcgtaatgaattacgtgttcactcttgagacttggtattcatttttcgtcttgcgacgttaagaatccgtatcttcgagtgcccacacagattgtctgataaattgttaaagagcagttgcgacgcggctttcagctcactgtcgcgaggtggcgtatattacgctttcctctttcagagtcaaccctgaatttcaggatttttttctcttcgttgttccgaccatcctgtgaagtgtttcacgttgtcgtctcaacggaggcgcattatagggatcccaattttttgcacaagtatttttttgatctttttttctgtttgttgttttttcaccctttttgctgcaatcgcacacaaaacggtgcttttttgcatactaaaagacttgcacaaggccaataatgcccccaaagtcattagtaaatcatttattgctgaggtaagtatgtctgatgttttacgcccataccgcgatctttttccacaaatcggtcagcgcgtaatgatcgacgatagcagtgtcgtgattggtgacgttcgtctggctgatgatgtggggatctggccgctcgttgtgattcgtggagatgtacattatgtacagatcggagcacgcaccaatatccaggatggcagtatgttgcatgtcactcataaatccagctacaacccagatggcaacccattaaccattggcgaagatgtcactgttggtcacaaggtgatgctccacggctgcaccattggcaatcgagttttggttgggatgggcagtattttacttgatggcgcaatagtagaagatgatgtgatgattggtgcgggtagtctggtcccacaaaataaacggctggagagcggatatctgtatctcggtagccccgtcaaacagatccgcccgttaagtgatgaagagaaggctgggttacgctattccgcgaataattacgtgaaatggaaggacgaatatctggatcagggtaaccagacccagccttgatcatcttcactttgttcctgaattaagttttccgcttcttcttccaggtcccagcgatgctgacgaaaactcgctaaccactgttctggcgtatctccagtaaagcgatacgccagactctcgccagagatcgcgcatgtcagttgcataccattcacgagagcgggaaaacatacacattttttattctcgtcccactcttccctgtccggaaactggatggcctgattcacgcggacaattcctcctgcaattgctttataactggttctacgtcaggcagaacaccgtgccagagaagaaaggcatgagccgcctgtgccaccagcattcctaaaccatcagcattacgcttactgcctcgctgctcacaccatgccagaaaaggagtttttcctttctgatagaacatgtcatagcaataaatgcctggatgaatgaggctactcgggatcgccggaatatcaccactgatgccactggatgttgcattaataatgagatcaaactcatgaccttccagttcgtccatactcaacgcctgaatactgccagtgtgcgcaaacaatttagccaactcttccgcgcgggataccgtccgattagttattgtcaccgcacagtccagggaaaggagtggcagtagtacgccgcgagatgctccaccagcgccgataagcagaatacgtaaaccagggcggataaaagacagacgttccagatcgcttaacaagcctacaccatcggtattgtcacccagcaggcgtccatcttctaaccgcatgagggtattaacagcaccagccaacgctgcccgttcagtaagctcatccgctctggcaaaagcctcttctttaaaaggcaccgtcacattcgcacctttaccaccagcactaaagaaagcgttcagtgtgttgatgaaatcattgatgggtgccaacacgcgcccatagggatgttcaatattcagttgctgagcaaattgctgatgaatgaatgggcttttgctgtgggctatcggattaccaaaaacagcataggtttccattatgttacccctgtcgaaacagttcacccgtcagggcatcgcggatttcactaggatttaaacgcccccccgtttcaccaggcacaaccgggaacgccgcgccaaattgtgcgcgaacttcgtctactgttcgacaaggtggcaatccactcaagttggcactggtagaaaccagcggtttaccataagcctggcacaaagcaaccaccaacggatggtcggtgactcgtacagcaaggctatcaaagcggcccgtcaaccagcgcggtgttgtcgcaggcgcgggaaagacaaaggtgacaggacctggccagcgggaaaaaatggtttcacgctgcacgtcagtcaacatggtgtcatcaatatagggtttaagctgctcgtaatttgctgcgattaaaatcagccccttatcaaccggacgctgttttaactccaacagtcgcatcactgctgtttcgctatcaggatcgcacccaacaccgaaaacggcttccgttggataggcgatgacacgttcttcattgagaacatctatcgcagctgcgatagcgtctctttgcaggttattattcacgttattattccgcgctaaccggctttccacattgtttactggcacaaaagtgttttacaccctgcgcggttttcttttcgatgagtagcggataatgacactcagggcattctccagctatgggtttgaagttaatggcaaattgacactccgggtagcgatcacaagagtgaaatgttttgccataacgggagcggcgctggaccagatggcccgtccgacattgggggcatgtaattgctgtttcgtccggtttatcgataagttcggtatgttcgcattcagggtagttaatgcaaccaataaacataccaaagcgtccctggcgtaataccagatttgcgccacatgcagggcaaacctgcccctccagaactttgacgatatgtccatccgcactagatttcagaggacggacgtagtcacacgccggatactgactgcatccaagaaacggaccgtgtttcccggatcgaataaccagttcagccccgcactttgggcaggactcattattacgcaccgtgaacagtgcacttttcgccataacaacttatgctgaattaaagaaatgattaatgcagcataccttcattcacttcaaagagtaattcttccatttgctggtacgcattttcgcagcccggaatattgaacaacaccatcaggatcacccatttcagatcatccagttcgaactctgcgttatccagcgcgagcactcgctctatcaccatttcacgagtttcaaggttgagcacctgaatctgctcaaggaaaagcagaaacccacggcagctggcatccagtcgttcacactcttccggtgtataaatacgcatggagagaggatcgctggccagttgcatcggttctgccaacccttcctgataatcagcaagtttttccagccatagcagggcattgtagatatcttctcgctcaaaacctgcgtcggtaagatcctgttcaagtttgtcttgatccacacgcaactcagcttctgtgtgaatataggtttcaaacaaatacattagtacgtcgaacatggcatgccctcctcaatcggacatagccgccgggtacagctgcgatccatcctgctaactccagttcgagtagttgagtaactacctctggcacaggttggccggcacgttcagcgacgacgtcaacaggtgttacctcatctcctacgttagccaggagctcaggaaatggcaatgccacgtcttgctgatctggactataaaaactattttcaggggcgtctggcaaccagtgcaatccaaattgcaagttttccagaatttcttccggttccgtcacaagaatcgcaccttgttttattaaccagtgaggcccttcgcttcccggattccctattggacctggcaaggcaaaaacttctcgcccctgctcaagcgcacaacgtgctgtcaccaggctaccactacgcaaagccgcttccaccaccagtacacctttacttagaccactgataatgcgatttcttcgtgggaaattgtaagcaaggggtggaacatcgaggggaaattcgctgacgagagcgcccccctgttcaagcagactggcagccagtcgggcatgacggcggggatgaatggtattaagtccattccccaatacagcaatgctgacgccatttacctgtaaggctgctttatgcgctacaccatcgattccacgcgccagtccactcgtaattgtcactccacgcgtcgccagagtttcgcaaaataatcgtccccatcgctcgccataccaactatgcgcccgactccccactacggcaagctgaaaactatgcagcgcgtgcagttctccttcaacaaacagtgcgccggggtaatctgtcgtcgccagaagttgaggaggataaaattcgctgtccgcaggaattaaatgatggttgggttgctccaaccaacaaagactgctttcgatactctttcgtggaaaactaagaaagcgttgtgcctgccgcaatgtaagccctgtttgctgcaatacaaccgcatcaatatggctctgttttgccacccagtgagcgatacggaccatatcatcgccgtacaagctgctgatactcattaaacgcagccaaatttctgtatcgaccatccttatctccctgccataagcagccttagcaatctttgcgattggtcagtgatgctgtcaatcagagggggatttgtctagaatagaagaaataatctttctaactcctgaacacatctctggagatttatgagtgttttgcaagtgttacatattccggacgagcggcttcgcaaagttgctaaaccggtagaagaagtgaatgcagaaattcagcgtatcgtcgatgatatgttcgagacgatgtacgcagaagaaggtattggcctggcggcaacccaggttgatatccatcaacgtatcattgttattgatgttagcgaaaaccgtgacgaacggctagtgttaatcaatccagagcttttagaaaaaagcggcgaaacaggcattgaagaaggttgcctgagcatccctgaacaacgtgctttagtgccgcgcgcagagaaagttaaaattcgcgcccttgaccgcgacggtaaaccatttgaactggaagcagacggtctgttagccatctgtattcagcatgagatggatcacctggtcggcaaactgtttatggattatctgagtccgctgaaacaacaacgtattcgtcagaaagttgaaaaactggatcgtctgaaagcccgggcttaaggataagaactaacgtgagtgaaagtctacgtattatttttgcgggtacacctgactttgcagcgcgtcatctcgacgcgctgttgtcttctggtcataacgtcgttggcgtgttcacccagccagaccgaccggcaggacgcggtaaaaaactgatgcccagcccggttaaagttctggctgaggaaaaaggtctgcccgtttttcaacctgtttccctgcgtccacaagaaaaccagcaactggtcgccgaactgcaggctgatgttatggtcgtcgtcgcctatggtttaattctgccgaaagcagtgctggagatgccgcgtcttggctgtatcaacgttcatggtagtctgctgccacgctggcgcggtgctgcaccaatccaacgcagtctatgggcgggtgatgcagaaactggtgtgaccattatgcaaatggatgtcggtttagacaccggtgatatgctctataagctctcctgcccgattactgcagaagataccagtggtacgctgtacgacaagctggcagagcttggcccacaagggcttatcaccacgttgaaacaactggcagacggcacggcgaaaccagaagttcaggacgaaactcttgtcacttacgccgagaagttgagtaaagaagaagcgcgtattgactggagtcttagcgcagcacagcttgaacgctgcattcgcgctttcaatccatggccaatgagctggctggaaattgaaggacagccggttaaagtctggaaagcaagcgtcattgatacggcaaccaacgctgcaccaggaacgatccttgaagccaacaaacaaggcattcaggttgcgactggtgatggcatcctgaacctgctcagcttacaacctgcgggtaagaaagcgatgagcgcgcaagacctcctgaactctcgtcgggaatggtttgttccgggcaaccgtctggtctgatagtccactcttctaagcccggtcttgccgggcgtttttatacttatgaaaaaacaacgtaatttacgtagcatggcggcccaggccgttgaacaagtcgtcgagcaagggcaaagtttaagcaacattctgccaccgctccagcaaaaagtttccgataaagacaaagcacttcttcaagagttgtgctttggcgtactgcgtacgcttagccagttagactggctgattaataagttaatggcccgtccgatgaccggcaaacagcggaccgtgcattacctgattatggttggtttgtatcaactgctttatacccgcattccacctcatgctgcgctggctgaaacggttgaaggcgctatcgcaattaagcgtccgcaacttaaagggttgataaacggtgtattacgccagttccagcgtcagcaagaagagttattagccgagtttaatgccagtgatgcacgttatctgcatccttcctggttgctgaagcgtctgcaaaaagcgtatccagagcagtggcaatccatcgtcgaagccaataaccagcgtccgccaatgtggctgcgtattaatcgtacgcatcattcccgcgacagctggcttgcattgctggatgaagcaggaatgaaaggtttcccgcatgcggattaccctgatgctgtacgtctggaaacacctgcacctgttcatgcgctacctggttttgaagacggatgggttaccgttcaggatgcaagtgcacaaggttgcatgacctggcttgcgccacaaaacggtgaacacattttggatctttgtgccgcccccggcggtaaaacaacgcatatccttgaggtggcaccagaagcgcaggttgttgcggttgatatcgacgaacagcgcctctctcgggtttacgacaatttaaaacgccttggtatgaaggcgaccgtgaaacaaggtgatggccgttacccttctcaatggtgtggcgagcaacagtttgatcgcattttattagatgcgccttgtagtgcaaccggtgtgattcgtcgccatccagatattaaatggttacgtcgcgatcgcgatatcccggaactcgcgcaattgcagtctgaaattctcgacgccatttggccgcatttaaaaaccggtggaactctggtctatgccacctgtagcgtgttaccggaagagaatagcctgcagattaaagcctttttgcaacgtaccgctgatgccgaactttgcgaaacaggaacaccagagcaaccgggtaaacaaaatctacctggtgccgaagagggcgacggcttcttttacgctaagctaatcaaaaagtgatgagataacgggtcgcgactgatgaaaattatcattctgggtgccggccaggttggcggcacactggcggaaaacctggttggcgagaacaacgatattactgttgtcgataccaacggtgagcgtctgcggaccttacaggataaatttgacctgcgggtcgtgcaggggcatggctctcatccacgcgtattgcgggaggcaggtgccgacgacgccgatatgctggttgctgtaaccagtagtgatgaaaccaatatggttgcctgccaggtagcctacagtcttttcaacacccctaatcgcatcgctcgtatccgcagtccagactacgtgcgcgatgccgataagctatttcatagtgatgctgtgccgattgatcatctgatcgcaccagagcagttggttatcgataatatttaccgactgattgagtatcccggcgcattgcaggtggtgaacttcgctgagggtaaagtcagcctggctgtggttaaagcctattatggcggcccgctgattggtaatgcacttagcaccatgcgcgaacatatgccacatatcgatactcgtgtggcagcaattttccgccacgatcgccccattcgtccgcaaggtagcaccattgttgaagctggtgatgaagtgttctttattgccgctagtcagcatatccgcgcggtgatgagtgaattacagcgactggaaaaaccgtataagcggatcatgctggttggtggcggtaatatcggtgcagggctggcgcgtcgtctggaaaaagattacagcgttaaactcatcgaacgtaatcagcagcgcgctgccgaactggcggaaaagttacagaatacgatcgtcttttttggtgatgcgagcgatcaagaactactggccgaagaacatatcgatcaagttgatctgtttattgccgtcaccaacgatgacgaggccaatatcatgtccgccatgcttgccaaacgtatgggtgcgaaaaaggtgatggtattgatccagcgtcgcgcttatgtggatctggttcaggggagcgttatcgatattgcgattagtccacaacaagcaactatttctgcgttgcttagccatgtgcgaaaagcagatattgttggtgtttccagtttgcgccgcggcgtagcagaagctattgaagccgttgctcacggtgatgaaagcaccagtcgcgttgtcggcagagtcattgacgaaatcaagctaccgccaggaacgattattggagcggtggtacgtggaaacgacgtgatgattgccaatgacaatctgcgcattgagcaaggcgatcacgtaattatgttcctcacagataaaaagtttattaccgacgtcgaaagactcttccagccaagccctttcttcttgtaattaataaggcgtctaatgacgccttattatttccctttgattatcaaggattaattaaattcattcctggcaggaaaatggcttaacatttgttagacttatggttgtcggcttcatagggagaataacatgagcattattaaagaatttcgcgaatttgcgatgcgcgggaacgtggtggatttggcggtgggtgtcattatcggtgcggcattcgggaagattgtctctagtctggttgccgatatcatcatgcctcctctgggcttattaattggcgggatcgattttaaacagtttgctgtcacgctacgcgatgcgcagggggatatccctgctgttgtgatgcattacggtgtcttcattcaaaacgtctttgattttctgattgtggcctttgccatctttatggcgattaagctaatcaacaaactgaatcggaaaaaagaagaaccagcagccgcacctgcaccaactaaagaagaagtattactgacagaaattcgtgatttgctgaaagagcagaataaccgctcttaacaagcgccactaagcagaagaccagtggtaaaaaagtgatttactttcttgccactggcctcccagttcccccgattgccatgttttccttttcgcatgtaactgcctttccccttcttatttttctctacgcgctgtcggaataagggatcatgtagtaatgcttctatcgcattatcctttatctgccctttagtatgctgatatcgactcataaaaactccagttggttatttaacggcgcgagtgtaatcctgccagtgcaaaaaatcaacaaccactcttaacgccactcgccccttgttcaagagcttcaagaatgctacaataaacactgctatgagcagtcccacaacaggcatcgttaaggcgttgcaaggaacgctgcatactctgcaactcggctatccgtgcttcgacttcctgcaatctttcctgcacaatgcctttactctcctgacaggtatggtgttcaggatcgatgcggatgctcagcaactcgcggatgctctccagactgaaacctagttgtctggcatggcggataaatttcaatcgctggagatcgctttcggtatataggcgaaacccaccttcagtacgcacttcatgctccatcatctgctgtttttcgtaataacgaatcgtgtcgggtgttacttccgccatttttgccagctcaccaatgcgatacatacatactccattagttatcgttgattttgtccaacaacttgtcagcataatcgccgcgtaaaaaatcggtactcaatccagcttgtcgcagcttcaattccagtaaactcaatcgacggctaacctcttgatattgcggatcatcgtgacggatacctttgagaatatccagaagctgaattgcttctctccgttgctcaagttctggcggtaagcaaccggcattcttcagcaagcgataccccgcacgtaattccggtggcacgtgagaatcatcatccagtatcaatggttcgccgctacctgccaggttatcaaactcacctttcgcttgcgcttctgctatatggcgctctgcccactggtcaagtaaccacataaatactccaggggatgaacaaaaagagtacagctattgtagataagtggggatactacgggtataaaaaaacccgccggggcgggtttttttacgttgcttcagattactctgcagcagcttctgctttctcactacgatcaaccagctcgatgtaagccatcggcgcgttgtcgcctgcacggaagccacacttcagaatacgagtgtaaccaccggcacggctcgcgaaacgcgggcccagttcgttaaacagttttgccacgatctcgttatcacgagtacgggtgaatgccagacgacgattagcaacgctatcagtcttggcaagagtaatcagcggctcaactacgcggcgcagctctttcgctttaggcagagtcgtcttgatgatttcatgacgaaccagactacctgccatattgcggaacatagcctggcgatggctgctgttgcggttcagttgacgaccactcttacgatggcgcatgaccttatccttctcagtaaaaccttaacctgtgattcggttactcgtcagcgatgcttgccggtggccagttttccaggcgcatgcccagagacagtccacgggaagccagcacgtctttaatctcagtaagagattttttaccaaggttaggcgttttaaggagctcaacctcggtacgctgtaccagatcaccgatatagtggatagcttctgctttaaggcagttagcagagcggacagtcaattccagatcgtcaacagggcgcagcaggatcggatcgaactctggtttctcttctttcacttcaggctgacgtacatcacgtaagtcaacgaaagcttccagttgttcagccagaatggttgccgcacgacgaatcgcctcttcaggatcgattgtgccgttggtttccatttcgatgaccagcttgtccaggtcggtacgctgttctacacgcgctgcttcaacattgtaggcaatacgctccacagggctgtagcatgcgtcgaccagcagacggccgattgggcgctcatcttcttcgctatgaattcgggtagaagccggcacataaccacgaccgcgctgaactttgatacgcatgctaatagacgcgttctcatcggtcaggtggcagatcacgtgctgcggcttgacgatttcgacatcaccgtcgtgggtgatatcggctgcagtcacagggccaatgccagatttattcaaggtaagaataacttcatctttgccctgaactctcaccgccagccctttcaggttgagcaggatttccaggatatcttcctgaacgccttctttggtgctgtactcatgtagtacaccatcaatctcaacctcggtcaccgcgcaacccggcatgctactgagcagaatacggcgcagtgcgttacccagagtatggccaaagccacgctctaaaggctcaagggtcaccttggcgtgcgtgctactcacttgctcgatatcaaccaggcgcggttttagaaactctgtcacagaaccctgcattgtgtcctctctttggtactaagctttacttggagtaaagctcgacgatcaggtgttcgttaatgtccgcagacagatcagaacgctccggcttacgcttaaacgtaccttccatcttgccagcatcaacttccagccaggttggcttttcacgctgctcagccagctccagagcggctttcacgcgagactgcttcttcgctttctcacgaatgcttacaacgtcattcggactaacctgataagaagcgatgttaacaacacgaccgtttaccataattgctttatggctaaccagctgacgtgcttctgcacgagtggcaccgaagcccatacggtatacaacgttgtccagacgaccttccagcagagccaacaggttttcaccggtgttgcctttcagacgtgctgcttctttgtagtagttacggaactgacgctccagcacaccatagatacggcgaactttttgcttttcacgcaactgcacaccatagtcagacagacgcggtttacgcgcaccgtgctggccaggagcttgttcaattttacacttggtatcgatcgcgcgaacgccagacttaaggaataagtcggtgccctcacgacggctcagcttgagcttaggacccaaatatcttgccattttctttctccaacaaacctggaaaacgaggcgttatacgcgacgttttttcggcggacgacaaccgttatgagggatcggagtcacatcagtaatgttagtgatgcggaaacctgcggcgttcagagcacgaatagtagattcgcggcctggacccggacctttaaccataacttccagattcttgatgccgtattctttcacggcgtcagcgcaacgctctgctgcaacctgagctgcaaacggagtggatttgcgagaaccacggaaaccggaaccaccggctgttgcccaacccaacgcgttaccctgacgatcagtgatagtcacgatggtgttgttgaaagaagcatggatatgagccacgccgtcagagacttgttttcttacacgtttacgtgcacgaattggtgcctttgccattattcaatcaccccgattatttcttgatcggtttgcgcggacccttacgggtacgtgcgttggtcttggtacgctgaccgcgaaccgggagaccacgacgatgacgcaaaccgcgatagcaaccaagatccatcaggcgcttgatgctcatgctgatttcacggcgcagatcaccttcaacgacaaatttggcaacttcgtcacgcagcgtgtcgatttgtccttcagacagctcactgatcttaacatcttcagcgatacccgctgcagccaggatggctttagaacgggtcttgccgacgccataaatgctagttaatgcgattacggcatgcttatgatcaggaatgttaatgcctgctatacgggccactatgcactcctactatttaatatgtacgttccatgctgaaaagcccgttttcaggatactcaaatggaaacgcacagacatacaaaagattggctggctaatctagccagctcaacccaactttgcaagaaaaatatgcgaaaaaatcagccttggcgctgtttatgcttcggctcggcactgcaaatcacacggatgacaccatcacgcttaacgattttgcagttacggcataatttcttgacggaagcacgaactttcatttttactctccgtaacttctcgggcgaccaattatcggccgtagcctttcaggttcgccttcttcaatgcagactcatactgactggacatcatcagagtttgcacttgagccataaagtccataatcacgacaacaacgataagcagactggtcccaccgaagtagaacggtactttcattgcatcacgcatgaactccgggatcaggcagataaaggtaatatacagcgcaccaaccagggtcaggcgggtcattactttatcgatatacttcgccgtttgctctcccggacgaattcctggtacaaatgcaccggacttcttcaggttatctgctgtttcacgcgggttgaaaaccaacgccgtgtagaagaaacagaagaagatgattgcagacgcatagagtaacacataaagcggttgcccaggctgcaaatacaggctaattgttgtcagccagttccaaccagtaccgcccccgaaccaactcgcgatggtcgccgggaacagaataatactggaagcgaagattgccgggattacccccgccatattcactttcagcggtaaatgtgtgctctgtgcagcatagacacgacgaccttgctgacgtttcgcgtagtttaccacaatgcggcgttgaccacgctcaacaaatacaacaaagaacgtcactgcaaatactaatactgcaaccaacagcaacacgaggaagtgcaggtcgccttgacgcgcttgctcgatagtatgggcaatggctggcgggagtcccgcgacaataccggcgaagataatgatactaataccgttgccgatacctcgttcagtaatctgttcgcccaaccacatcaggaacatggttcctgtgaccagacttacaacagcggtgaagtagaatgcaaagcccgggttaatcaccaggccttgcataccaggcatattcggcagaccggtagcaataccgatgctctggaatattgccagcaccagagtaccgtagcgggtgtactggctgatcttacgacgaccagactccccttctttcttaatttctgccaacgttgggtgaaccaccgtcagcagctggataatgatgctcgcgctaatatacggcatgatccccagagcaaagatagaagcacggctgagagcaccaccagagaacatgttaaacatctcaatgatggtgcctcgctgttgctcaagcagtttggcaagtacagcggcatcaataccagggatcggaataaaagagccaatacggaacacaatcagcgcaccgataacaaacagcagtctgcgtttcagctcgcctaagccacctttggcactttgaaaatctaatcccggttgtttagccatctgctacttattcctcgattttaccgccagcagcttcgatagcagcacgagcgcctttagtaacacgcaggccacgaacagttaccggagtcgttacttcgccagccaggatcactttcgcgaactcgatctggataccgataatgttagccgctttcagcgtgttcaggtctactacaccgccttctactttagccaggtcagacagacgaatttcggctgtaatcgctgctttacgagaagtgaagccgaatttcggcagacgacggtacagaggcatctgaccaccctcgaaaccgcgacgtacgccaccgccagaacgagacttctgacctttgtgaccacgaccaccggttttaccgaggccagaaccgataccacgacccaggcgtttacccgcctttttggagccttcggccggagacagagtatttaaacgcatctcttactcctcaactttaaccatgaaggaaaccgcgttgatcataccgcgaatagcaggagtatcctcgcgctctacggtgtgaccaatacgacgcagacccaggccaagcagcgttgccttgtgtttcggcagacgaccgattgcactgcgggtttgagtaattttaatagtctttgccatggtttatttccccagaatttcttcaacggatttaccacgcttggcagcgaccatttctggagaattcatattttccaggccatcaatagttgcacgaaccacgttgatcgggttggtggaaccataggctttagccagaacgttatgaaccccagcgacttccagaacggcgcgcattgcaccaccggcgatgataccggtaccttcggaagccggctgcatgaatacgcgagaacccgtgtgaacacctttaacagggtgttgcagagtgccgttattcagcgcgacgttaatcatattgcgacgggctttttccatcgctttctggatcgctgctggaacttcacgcgctttaccgtaaccaaaaccaacgcgaccgttaccatcgccaactacagtcagagctgtgaaggagaaaatacgaccacctttaacggttttagatacgcggtttaccgcgatcagcttttcctgcagttcgccagcttgtttttcgatgtgagccatcttacacctctaccttagaactgaaggccagcttcacgggcagcatctgccagtgcctggacacgaccatgatattggaacccggaacggtcaaaggatacatctttgatgcctttttccagagcgcgttcagcgacagctttacccacagctgcagccgcgtctttgttaccggtgtacttcagttgttcagcgatagctttttctacagtagaagcagctaccagaacttcagaaccgttcggtgcaattacctgtgcgtaaatgtgacgcggggtacgatgtaccaccaggcgagttgcgcccagctcctggagcttgcggcgtgcgcgggtcgcacgacggatacgagcagatttcttatccatagtgttaccttacttcttcttagcctctttggtacgcacgacttcgtcggcgtaacgaacacccttgcctttataaggctcaggacgacggtaggcgcgcagatccgctgcaacctggccgatcacctgcttatcagcgcctttcagcacgatttcagtctgagtcggacattcagcagtgatacccgcaggcagctgatggtcaacaggatgagagaaacccagagacaggttaatcacattgcctttaaccgctgcacggtaacctacaccaaccagctgcagcttcttagtgaagccttcggtaacaccgataaccatactgttcagcagggcacgcgcggtaccagcctgtgcccaaccgtctgcgtaaccatcacgcggaccgaaggtcagggtattatctgcatgtttaacttcaacagcatcgttgagagtacgagtcagctcgccgtttttacctttgatcgtaataacctgaccgttgatttttacgtcaacgccggcaggaacaacgaccggtgctttagcaacacgagacattttttcctccgattaggctacgtagcagataatttcgccaccaagaccagcctggcgcgctgcacgatcagtcataacacctttagaggtagaaacaactgcgatacccagacccgccataactttcggcagctcatctttacgtttatagatgcgcagacctgggcggctgacacgctgaatgctttctacaacagctttgccctggaaatacttcagagtaagttccagttcaggcttggtgtcgccttcaactttaaaatcttcaataaaaccttcttccttcagcacgttggcgattgccactttcagcttggaggaaggcatggtgaccgcagctttgttcgcggcctgaccgttacggatacgggtcagcatatccgcgatcggatcttgcatgctcatctgtctttactcccgtgattcaattggtgacaattaccagctagcctttttcagacccgggatttcaccgcgcatagcggcttcacggaccttaatacggctcaacccgaacttccgcaggaaaccatgcggacgacctgtttgacggcagcggttacgctgacgagacgggctggaatcacgcggcagagtctgcagcttgagaacagcgttccaacgatcttcgtcggaagcgttcacatcagagatgatcgctttcagttcagcgcgtttcgcgaagtatttatcagctaaagctacgcgttttacttcgcgtgctttcatactttgcttagccatttagtaaccctaccttacttgcggaacgggaagtcaaaggcagccagcagagcgcggccttcttcgtcagatttcgcagtagtggtaatggtaatatccaaaccacgaacgcggtcgactttatcgtagtcgatttctgggaagatgatctgctcacggacacccatgctgtagttaccacgaccgtcgaaagacttagcggacaggccacggaagtcacggatacgaggtacagcaatagtgatcaggcgctcaaagaactcccacatgcgttcgccacgcagagttactttacagccgatcggatagccctgacggattttgaagcctgcaacagatttgcgtgctttggtgatcagcggtttttgaccggagattgctgccaggtctgctgctgcgttatccagcagttttttgtcagcgatcgcttcaccaacacccatgttcagggtgatcttctcgacccgagggacttgcatgacagaattgtagttaaactcagtcatgagttttttaactacttcgtctttgtagtaatcatgcagtttcgccatcgtactactccaaattacttgatagtttcgctgttagacttgaagaaacggacttttttaccgtcttcgaatctaaagcctacacggtcagccttgccggttgccgcattgaagattgctacgttggaaacctgaatagcggcttctttttcaacgatgccacccggttggttcagggccggaaccggcttctgatgtttcttaaccaggttgataccttcaacaatgaccttgccggaagacaggacattcttaactttaccgcgtttacctttatctttaccggttaacacgataacttcgtcatcacgacggattttcgctgccatgattcgctccttagagtacttctggtgccagagagataattttcatgaacttctcactacgaagctcacgagttaccggcccaaaaatacgcgtaccgataggctgctcgctgttgttgttcagaagaacacaagcattaccatcgaagcgaatgacagaaccgtccgggcgacgaacacccttcttggtgcgcaccactaccgccttcagcacatcaccttttttgaccttaccacgcggaattgcttctttgatggtgatcttgatgatgtcgcctacgcctgcgtagcgacggtggctgccacccagaaccttgatacacattacgcgacgtgcaccggagttgtcggcgacgttcagcatagtctgttcttggatcattttagtgctccgctaatgtcaactactactgagacccgaaaatcaggtcgttaaaaatccccatatcgagggcgcggcattataacaccgcttcaaggatatgggtagaaaaaataaacggctcatttctgagccgtttattcgtattgagagagtgtactgtattacagaaccgctttctctacaacgcgaaccagcgtccaggatttagtcttggacagcggacggcattcgcggatttcaaccacgtcaccgataccgcattcgttgttctcgtcatgtacgtgcagtttggtcgtacgcttgatgaatttaccgtagatcgggtgtttcacaaaacgttcgatagcaacaacaatggatttctccattttgtcgctaacaacgcgaccttgcagagtacggattttatcggtcattacgcacccgccttctcgttcagtaaagtcttaacgcgtgcgacatcgcgacgcacttgcttcaacaggtgagactgttgcagctggccacttgcagcctgcatacgcaggttgaactgctcacgcagcaggttcagcagctcggtgttcagctcttcaacgctcttctcacgcagctcttttgctttcattacatcaccgtcttagttacaaaggtggttttaatcggcagtttcgctgctgccagcttgaatgcttcacgggccagctcttccggaacaccgtccatttcatacaggactttacccggctgaatcaaggcaacccaatactccacgttacctttacctttacccatacgcactgccagcggcttttcagtgatcggtttgtccgggaacacacggatccagatcttaccttgacgcttaactgcacgggtcatagcacgacgtgctgcttcgatctgacgggcagtcagacgaccacggccaacagctttcagaccgaagctgccgaagctaacatccgtaccctgcgccagaccgcggttacggcctttgtgcattttacggaattttgtacgctttggttgtaacatcagcgacgctccttatttacggcctttacgctgctgctttttaggctgagcagccggtttttccggttgttcaacagcagccataccacccaggatctcgcctttgaagatccacactttaacgccgattacaccgtaagtggtgtgcgcttcagaggtgttgtagtcgatgtcagcacgcagagtgtgcagcggtacgcgaccttcgcggtaccattcggtacgtgcgatttccgcgccgcccagacggccgctaacttcaactttaatacctttagcgcccagacgcattgcgttctgtacagcacgcttcatagcacgacggaacataacgcgacgttccagctgagaagtgatgctgtcagcaaccagttttgcgtccagttcaggcttacgaacttcggcgatgttgatctgtgcaggaacgccagcgatgtccgctacgaccttacgcagtttttctacgtcttcaccttttttaccgataacgatacccgggcgagcagtgtgaatggttacacggatgctcttagccggacgctcgataacgatacgagatacggacgctttagccagttccttagtcaggtactgacgtactttaaaatcgctgtccaggttgtcagcgaattctttggtgttcgcaaaccaggtagagttccatggttttacaatacccaggcgaataccattaggatgtactttctgacccattgctagtctccagagtctcagcgatcggacacaaccacagtgatgtggctggtgcgcttcaggatgcgatctgcacgaccttttgcacgcggcataatgcgcttcatgctcgggccttcgtctacgaaaattttcgtaactttcagatcgtcaatgtcagcgccatcgttgtgttcagcgttagcaatggcagattccagaactttcttgaccagtacagccgctttcttgttggtgtaggtcaaaatatccagagcctggctcactttcttaccgcgaatcaggtcagcaacaaggcgaaccttctgagcagaagaacgagcatggcgatgtttagcgatagtttccatctcttcctcctaccttatttcttcttcgcttttttatcagcagcgtggccgcgataagtacgagtcggtgcgaattcacccagtttgtgaccaaccatttcgtcggttacaaataccggaacgtgctgacgaccattatggacagcgatggtcaaaccgatcatgttaggaaagatcgtactacgacgggaccaagtgcgcaggggcttcttgtctccgctttccaccgctttctctaccttcttcagcaagtgcaggtcaataaaaggacctttcttgagagaacgtggcatggcttatcctctaaaattatttgctacggcgacgtacgatgaatttatcagtacgcttgttgctgcgggtcttcttacctttggtctgaacgccccacggagttaccgggtgcttaccaaagttacgaccttcaccaccaccatgtgggtggtctaccgggttcatcgcggtaccgcgaacggtcggacgaacaccacgccagcgtgcagcacctgctttacccagaacgcgcagcatatgctcagcattgccaacttcgcccagagttgcacggcagtctgcttctactttacgcatttcaccagaacgcagacgcagggtgacataagcaccatcacgagcaacgatctgaacgtaagtaccagcggaacgtgccagctgaccgcctttacctggtttcatttctacgttatgaacagtagaaccaaccgggatgttgcgcatcggcagggtgttacctggtttgattgcagcatcaacgccagactgaatctggtcgccagctttcaggcctttaggggccaggatgtaacggcgttcaccgtctttgtacagaaccagcgcgatgttcgcggaacggttcggatcgtactcaagacgttcaacaactgccgggataccgtctttgttgcgtttgaagtcaacaatacggtaagcctgcttgtggccaccaccgatatgacgagtggtgatacggccattgttgttacgaccaccggatttgctgtttttttccagcaacggagcaaaaggtttgcccttgtgcagctcagggttaaccactttaactacgtggcgacgacccggagatgtcggtttacatttaacaactgccattgtattactcctccgacttactcagcgccgccaacgaagtccagattctggccttctttcagggtgacgtaagcttttttccagtcgctacgacgaccgatacgctgtccgtgacgtttaactttccctttaactaccagggtgttaacgacttcgacttcgacttcaaacagtttctgcacagcagctttgatttctgctttggtcgcgtctttagcaactttgagtacgatggtgttggatttttccatcgcagtagacgctttttcagaaacgtgcggtgcacgcagcaccttcagcagacgttcttcacgaatcatgccagcatctcctcaacttgcttaacagcatcagcagtcattacgactttgtcgaaggcgatcaggctaaccgggtcgataccagttgcatcgcgtacgtcaaccttgtgcaggttgcgcgcagccaggaacaggttttcgtccagctcaccggtgatgatcagcacatcttccagagccatgtctttcagtttctgtgccagcagcttagttttcggcgcttctacagagaacttctcgacaacgatcagacgatcctgacgtaccagttcggacaggatgcttttcagcgcgccgcggtacatcttcttgttaactttttgactgtggtcctgcggacgagcagcaaaggtcacgccaccagaacgccagatcgggctcttgatagaaccagaacgcgcacggccggtgcctttctggcgccacggttttttaccggaaccagttacttcagcacgagtcttctgagcacgagtaccctgacgagcaccagctgcataagcaacaacaacctggtgaaccagcgcttcgttgaaatcacgaccgaaggtagtttcggaaacagtcagcgcgctctgcgcgtctttcaatactaattccattgctatctccttacgccttcacagctggtttaacgatcaggtcgctaccggttgcacccgggacagcacctttaaccagcagcaggttgcgctcagcgtcaacgcgtactacgtcaaggctctgaacggttacacgttcgttacccatctgacctgccattttcttgcctttgaacactttgcccggagtctggttctgaccgatagaacccggaacgcggtgagacaaggagttaccgtgagtagcgtcctgggtacggaagttccagcgcttaacggtacctgcgaaacctttacctttagaggtgccagttacgtcaacttttttaacgtcagcaaacagttcaacgctaatgctctgacctacagtgaactcttcgccttcagccaggcggaattcccacagaccacggccagcttctacgccagctttagcgaagtggccagcttcaggcttggtcacacggttagcttttttagcaccggtggtcacctgaatagcacggtagccatcgttagccaggtctttaacctgagtaacgcggtttgcttcaacttcgattacggttactgggatagaaacgccgtcttctgtgaagatacgggtcatacccacttttttaccgactaaaccaatcattgtttcaacctctcaatcgctcaatgacctgattaacccaggctgatctgcacgtctacaccggcagccagatccagacgcatcagagcatcaacggttttctcggttggctcaacgatgtcaaccagacgcaagtgagtacggatttcgtactgatcgcgcgcgtctttgttgacgtgcggggagatcagaacagtgaagcgctctttgcgtgtcggcagcgggatcggaccacggacctgcgcaccagtgcgcttggcagtctcgacgatttccgcggttgcttgatcgatcagacgatgatcaaacgctttcaggcggatacggattctttggttctgcatgagaccagagctccaattattttataaacgaaaatgattactcctcagacccattacgattgatgggagagtgtaaccgttcttacgtagctccccgattgggagcattgttaggtagccaaattcggctaactgaggttcagattgaacctgctgtcaactacgacaagcccgcgcattatacatacttaaccaccgaacgcaagcgtattgctagtaaagtaaacagccttcgggttatctctcaagttcgttcagtgcatttttgacacgctctcttaaaccggctttctcttcgctttcttccacagtattttcttcgtcttcagaagaagagggggcattctcaaccgcgacgcctgggtcatcttcctcctcgacggattcgacgacggggagtggctgttttttgaagaaatagtgttgtgtactttgtttaaaagcgggcgtttcagcctctacagtgacttcggcttttactatccaaagcacccatagctgcctggcatacccaccaaccagcaccattcctgcaaaccacaggcaaatcagtaataaacaaattacatatattatggtgctgtgtttttgtcgggagaagataccagggtgacctgtttctttctgctcacgcgcggcgatatagaattcaaacattataatcccttgtgacgtaaaaactgcaaaacaaaagtcctacgcaggaattatttacgttttacgagaacccttcaatatgaattaaattacggcattaaaaataagaaaaaagcctgacaaatgaagcattttaaaaacagaaacattcatatttaaaatgttaaattgaattgatattttaaatatgaataatttattcgttctgacagtacgaataagatatgccgtcaacaaatgcaaaaagggcgccgaagcgcccttttcaattcaaaactaattaacgtgtaattagcccagaactttagcaacaacgcccgcgccaacggtacggccgccttcacggattgcgaaacgcagaccgtcgtccatcgcgatcgggtggatcagggtaacaaccattttgatgttgtcgcccggcattaccatctctacgccttccggcagttcgatggtaccagtcacgtcagtagtacggaagtagaactgcggacggtagcctttgaagaacggagtatgacggccgccttcatctttggacagaatgtacacttcagattcgaacttggtgtgcggcttgatggtgcccggcttagccagtacctgaccacgttcgatttcttcacgtttgataccacgcagcagaacacctacgttctcaccagcacggccttcgtccagcagtttgcggaacatttcaacgccagtacaggtagacttctgagtctctttgataccaacgatttcaacttcttcaccaactttgatgataccgcgttctacacgaccggtaacaacggtaccacgaccggagatggagaatacgtcttcgatcggcagcaggaacggcttgtcaatcgcacgctctggttccggaatataagaatccaggaagccagccagttccaggattttcgcttcccactctgcgtcgccttccagcgctttcagagcagaaccacgaacgatcggagtgtcgtcgcccgggaagtcgtactgagacagaagttcacgaacttccatttcaaccagttccagcagctcttcgtcatcaaccatgtcgcatttgttcaggaacacgatgatgtacggaacgcctacctgacgacccagcaggatgtgctcacgagtctgcggcatcgggccgtcagtcgcagcaactaccaggatcgcgccgtccatctgagcagcaccggtgatcatgtttttaacatagtcggcgtgccccgggcagtctacgtgtgcgtagtgacgggtcggggtgtcgtattcaacgtgagaagtgttgatggtgataccacgagctttttcttccggcgcgttatcgatctggtcgaatgcacgagcagcaccgccgtaggttttagccagtacggtggtgattgcagcggtcagagtagttttaccgtggtcaacgtggccgatagtaccaacgttaacgtgcggttttgtacgttcaaatttttctttagacacggctatattccttactatagtgctctccccttcaggagagagcacgggactttggtattaacccttaggcttatttaccacgggcttcaattacggcctgagcaacgttactcggcgcttcatcatacttcaggaattccatagtgtaacttgcacgacctttggtcagagaacgcagctgagttgcgtatccgaacatttcagacagcggtacttcagcgtggatcttaacgccagtaacttcagattcctgacctttgagcataccacgacgacggctcaagtcaccgataacgtcaccggtgttctcttccggagtttctacttcaaccttcatgatcggctcaagcagaactggtttcgctttcttaaagccttctttaaaggcgatagaagcagccagtttaaacgccagttcagaggagtcaacgtcatggtaagaaccgaagtgcagacgaatacccatgtctactaccgggtagcctgccagcggacctgctttcagctgttcctggatacctttatcaacggccgggatgtattcgccagggattacaccacctttaatgtcgttgatgaactcgtagcctttcgggttactacccggctccagcgggtacatgtcgataacaacatgaccatactgaccacgaccaccagactgtttcgcgtgtttaccttcaacatcggtaactttctggcggatagtttcacggtaagcaacctgcggtttacctacgttcgcttcaacgttgaattcacgcttcatacggtcaacgatgatgtcgaggtgcagttcgcccatacccgcgatgatggtctggttagattcttcgtcagtccatacacggaaagacgggtcttctttagccagacggcccagagccagacccattttttcctggtcagctttggttttcggttcaactgcgatggagattaccggctcagggaattccatacgttccagaatgatcggcgcatccgggtcacacagggtgtcaccagtggttacgtctttcagaccgatagcagcagcgatgtcgcccgcgcgaacttctttgatctcttcacgtttgttagcgtgcatctgaacgatacgaccgaaacgctcacgtgcagctttcacggagttcagtacggtatcaccagagttaaccacaccggagtaaacacggaagaaggtcaggttaccaacaaacgggtcggtagcgattttgaacgccagtgcagagaacggctcgtcatcacttgcgtgacgttcagccggagtgtctttaccgtcgtccaggataccgttgatcgcaggtacgtcaaccggggatggcaggtaatcaattaccgcatccagcatcgcctgaacacctttgttcttgaacgcagaaccacaggttaccaggatgatttcgttgttcagaacgcgctgacgcagagcacctttgatttctgcttcagtcagttcttcaccacccaggtatttttccatcagctcttcagaagcttcagctgcggattcgatcaggttctggtgccattcgttagccagttcaaccatgtctgccgggatatcttcgtattcgaaggttacgccctggtcagcgtcgttccagttgatagctttcattttcaccaggtcaacaacaccggtgaaatgttcttcagcaccaatcgccagctgcagcggaaccgggttcgcgcccagacgggttttgatctggttaacaactttcaggaagttcgcacccatgcggtccattttgttaacgaacgcaatgcgcggaactttatatttgtttgcctgacgccatacggtttcagactgcggctgaacaccaccaactgcgcagtaaaccattaccgcaccatcgagaacacgcatggaacgttctacttcgattgtgaagtcaacgtgccccggggtgtcgatgatgttgatgcgatgcggctcatactgcttagccataccagaccagaatgcagtagtcgcagcggaagtgatggtaataccacgttcctgctcctgctccatccagtccatggttgcagcgccgtcatgaacttcaccgattttatggtttacaccggtgtagaacagaatacgttcggtagtagtggttttaccggcgtcgatgtgcgcactgataccgatgttacggtagcgtgcgatgggtgttgtacgagccatttgtttcctcgtttatcttttaggcgttcaatttaagtagcccaaagcgggctgcttactggaagcgcccgcctggtgactaaaactccgaagggataaccaacggtagtgtgcgaacgccttgttggcttcggccatacggtgaacgtcttcacgtttcttaactgcagtacctttgttttctgcagcatcagaaagttcgttcgccaggcgcagagccatggatttatcaccgcgtttacgagcagcttcaacgatccaacgcattgccagagcattacgacgaaccggacggacttcaactggtacctgataagtagaaccaccaacgcggcgagacttaacttctacagtcgggcgcacgttttcgagagctacttcgaatgcttccagttcagatttaccagagcgctgagccagggtctccagcgcgctgtatacgatagattcagcagtagattttttaccatctaccatcaggatatttacaaatttagccagcagttcacttccgaacttcggatccggcagaattttacgctgaccaatgacgcgacgacgtggcatggaaatactccgttgttaattcaggattgtccaaaactctacgagtttagtttgacatttaagttaaaacgtttggccttacttaacggagaaccattaagccttaggacgcttcacgccatacttggaacgagcctgcttacggtctttaacgccggagcagtcaagcgcaccacgtacggtgtggtaacgaacacccgggaggtctttaacacgaccgccacggatcaggatcacggagtgctcctgcaggttgtgaccttcaccaccgatgtaggaagtcacttcgaaaccgttagtcagacgaacacggcatactttacgcagcgcggagttcggtttacgaggagtggtagtatatacacgagtacatacgccacgtttttgcgggcatgcttccagcgcaggcacgttgcttttcgcaactttgcgagcacgtggtttgcgtaccagctggttaactgttgccattaaatagctcctggttttagcttttgcttcgtaaacacgtaataaaacgtcctcacacaatatgaggacgccgaattttagggcgatgccgaaaaggtgtcaagaaatatacaacgatcccgccatcaccaggccatctggctggggtgcttaaccgtaagtctgacgaaatcagtatagtcaatgagaatgatgtcgttgctaatttgaccagtcaaaccgcgggcaataaggtcttcgttcagggcatagaccttaatgggggcattacgcagactttcaaggtagcggttaccgtcaactgcggcagttacgccatcttgcaataatagcagttcgtctccttcactgagcagacgcagcagcgcagcaaaatccgtcagccagggactgcgatgtaatgtgtgcagcataaacgcctcaaaacctcaaaataacatcgtagttggcgagttcgcggcgtaaggcatctgcttcgagcggcgtggcttcgacaacaaagggtgtctgcggatctaacccgcgttcgcgcagactagccgcacaaacccagcactgttcaatgtcgtacagacccaacaatttaaaagtggcaatgtaatcacgcgccagcactgcatcgggcttttgtcctggcagcagctgaaaaacgccatcagctataaagaagacagccagatcgtcagttaatgcggaagttgccagtaaagcatctaaaccttcccggcctgcggctgtaccatgaggtgcagtagaaaaaacaaacgcaattcgtttcatcagaactgtaccaccctgtcacaggtcaggctggcttccgccagcgccccaagtccgcttaaggtaaatccctgctgaaggttactgctagccagccccagtcttccggcctccgtttcatcaacaacgccacggcgtaatgctgccgctacgcagatattcagcgccacaccatgttgcgcattcagttgttgccaggcccgtacgaggtcaaattcgtcacttgccggagaggtcaattggttagcgttatagaccccttcccgatagaaaaagacgctgcttaactcatggccatctgctatcagcgcctgcgcaaactgaaaagcactactcgcctgttgcgtaccgtatgctggcccggtcaccacgatggcaaaacgcattacttatcttgcccctggaaatcaccgctcttgaactggcggatgtagagatagacagtgtgtttggagatgttcaggcggtcagcaacctggttgatcgcatctttaatatcgaagatccctttctcgtagagattcagcacgatctgacgatttttggcgttattagaaacattgcgatcggcattcacttcttcgatggtgaactccagcgtttgggtaaccagatcttcaacagaagaggcaaagttgacgctactaccgacatccggggtttctggcggcacaaaggtgctcataatctggctgaagggaacatcaagattcatattgatgcacagcagaccaattacacgctgttcgcggttacgaatcgcgatagtcagggacttcattaatacgccgcttttggcgcgagtaaagtagcatttagaaacgctgctatccgctcccgtcatatcgtgcagcatacgtagcgccaggtcagtaattgggctaccaatcttccggcctgtatgttcaccgttagcaatgcgaatggcactacattttagatcctgcaaagagtgcaaaacgatttcacagtgggagccaataagcatcgctaacccgtccaccaccgcttcgtaggatttcagaatatcaaaatcggtctggtcgaaaggacgttgatccagtaaatccaactcactggtttcgttggttaaaaggctcctggacatgaaaaaaaacactccttttcaggagcctgtcgttaacttttcagggcaggctcattaatgatgcgggtaactaaattaatacagcggaggttccgctttccagcactaattatatccggcctgtaataaaaaaaccgccgcctggtcaggcggcggttcttaatgcttattttttagcagaatctgcggctttcgcatcagcttccggctttgcatcagccttcggcgctggtttcacatccagcagctctacgtcaaacaccagggtagaattcggtgggatccccggaacacccgctttgccgtaagccagttctggtggaataaccagtttgatcttaccgcctttcttgatgttcttcagaccttctgtccaacccgggataacaccgtccagacggaaagaaagcggttcaccacgggtgtaagagttgtcgaactctttaccgtcgatcagcgtacctttgtagttcactacaacagtatcgctgtctttcggtgcttcgcctttaccggcttctactacctgataaaccagaccagtactagaggttttcacacctttctctttggcaaatttctcgcggtactctttaccttttgcttcgttatcagccgcgtctttttccatcttcgcctgagcagaagacttcacgcgagcttcgaatgcttgtagagtctgttcgatctcttggtcggagagtttgcttttatcagcaaatgcatcctgaacaccagcgatcagctgatctttatccagtttgatgcccagtttttcttgttcttttagagagttttccatgtaacgacccaggctggcacccagtgcataagcacttttctgatcgtcatttttgaacgctgctttgctgtcagcagctgtagcaggttttgcagcttcagcagcaaaagtgattggtgcatgcagggcaacggccattgtggtcgccagcagcgttactttaaacagacttttcatccatatctccaggatcggggcatctcaccccagggttaactattatcagaagggtactataaagcgttgtcgaacaaatctacatacagacacgccctattatcatctattttcagactctttttgtttaaattagtttcgatgaccgcgaaatgagtgctgtctcgggcagcaaagttaagtagaatccgcggcgaccattcgacaaaagaggtgaatcatgcaggatttaagtttggaagcacgcctggcagagctggagagccgactggcttttcaggaaatcaccattgaagaactgaacgtcacggtgaccgctcatgaaatggagatggcgaaactgcgcgatcatctgcgtctgctgaccgagaagttaaaagccagccagccgagcaacatcgcgagccaggctgaagaaacgccaccgccacattattgaggcgtaaaaaaagcggggattccccgcttttttgtcactttttcggtattagtggcaaccgcaaccgccgttgcctttaccgccacagcagccttcgccaccgtgttcatgaccgtgatcgtggccatgaccgccgcagcaaccgtcgtggtcgtgatcgtggtggtgatcgtgcgcgccgtgaacgtgaccatgagccagttcttcttcagtcgcttcgcgaatcgccacaacttcaacgttgaatttcaggttctgaccggccagcatgtggttaccatcaaccacgacgtgatcgtcttcaaccgcagtgatttcaaccggtaccggaccctggtcggtttcagccaggaaacgcatacctacctgcagttcatcaacgcccataaatacgtctttaggaacacgttgcaccaggttttcgtcgtactgaccgtaagcgtcgttcgcgccaacagcgacatcaaatttgtcgccaacttcatgaccttccagcgccgtttccaggccagagatcagggaaccgtgaccatgcaggtagtccagcggcgcactcaccggagactcatcaaccaacacaccgtcttctgtacgtacctgataggccaggctgaccaccaggtcttttgctactttcatgatatctcctgagcatgggaagaatagtggcgcagattgtagcggaattctgcagccgtgtactcactagcttaaaaaaactcggcgcatatcgttagtccggatgaaaaatcccgatcacttgctcatctttgcgaacgtgatcgcgggcttctttgtctgcttctcgcatctgatgtccgcacttaacacattcaacaatatcaatattattttcgcgccacatcgccatactatcctgcgcctgacaggccgggcattttgcgcccgcaataaaacgttttcggattgccatctttaccctttactcaaattcatcccagccgtccagctggcgtcgttcttgttgcatttcacgctggaaaatctcttccagttcgcgtcgggcttccctggcgcgagaaatttgtacggtatcggcatgcattgggatgagctctcgcagcatccgcatatccaggcggcgaaaatgcagttgcgctcgctgtgcctgatgcggatgcatgccaagcgtgaccagcgtcttgcgccccagctctaacgcactggagaatgtttcacgggaaaactgcgtcacccctgcctgtaataactcatgcgcttccacacgtccgcgcgctcgcgcaagaatatgcaaatgcggaaagtgctgttggcatatttccaccagcttcatggtgtcttccggctcgttacaggtaatgacgatagactcagcggcctctgcacccgcagaacgtaaaagatcgacctgcgtggcgtcgccgtaataaactttgtagccgtatttacgcatcaggttaacggcgctgatatcccgctccagcacggtaatgcgcattttatttgccatcagcaaacgaccaatcacctgaccaaaacgcccgaagcccacgacaatgacctggggtttatcatcgttgacccacggtttttcgtcttcttcttccggtccgttaaactggcgggatagccatttatccaccagcttcatcagcaacggcgtggtcatcatggaaagcgtcaccgtcaccagcaacaacgccatctggtcgccctggaataagcgttgactagaagcggtagaaaagaggacaaaggcaaactcaccaccctgactcaacacgccagcaaactgcatccgctcactgctacgcacgccatacaatcgcgccagcagatacagcacgagaattttcaccgccaccagcacaaccacgcttatcactacccacaacagatgggtataaagcaccccgaggttgagactcatgccgacagagataaagaacaaaccgagcagcaagcctttgaagggatcgatagccgtttccagttcatggcgatattcactttccgccagcagcacgcccgcaataaatgtaccgagcgccatgctcagccccagcgcatccataaacaatgcggaacccaacaccagcagcagcgtcgcggcggtgaacacttcccgcacgccagaagctgcaataaagcggaataccggacgcagtaaatagcgcccaccaatcagcatgccgacaaacgccagcaccttcatgccgaccttcatccagtcgaaatgttcgtctgcgctccccgccaacaacggcactaacgccagtgctgggattactgccagatcctgaaacagcagaacgctaaacccgagctggccggattcgctgcgattcatccctttctcacgcatcaattgcaacgccattgcagtactagacatcgcaaggccaatgccaccgaccaccgccgcctgccaggcgaaatccgtcagcatcaataatcccgccagcaacgccgcgcttaacagcacctgtgccgcgcctacgccaaaaatgctacgccgcagttgccaaagtttggagggattcaactcaaggccgatgataaacatcaggaataccacgccgagttcgctaaagtggaggatctcatcgacgtcgctaataaaccccagcccccacgggccaattgcaatccctgccagcaaatatcccaacacagcgccaatacccagccggcttgccagcggcaccgcagccaccgccgcgaagagaaacagcactcctgcgagtaaaaaatcggaaccttccatcagcggcctcctggagacagcggatttgccagccagtcaccgtaggctctggcgtggctcgccagctcctgtgcgctttgccgtctcgcccagtaaataatgatgggacttaaccaatgcatccggcacatgcccgccgccagttcaaaggggcgcagcacatcgctcatcgggtagcgattcagcgcgtcataacggtaagcactttccggctcgccggtggtaatcacgctacgccagtactttcccgccagttggtttcctcccggcccgctggcaaaaccacgacttaatacccggtccagccactctttcagtagcgccgggcagctataggtataaagaggatgctgaaagacaatcacctcgtgctcgcgcagtaatgcctgctcacgggggatatcaataaaaaaatcgggatagtgcgcgtaaaggtcgtgcacggtaacattgctgagctgcgtggccggtttaagcagtacccggtttgccacgctgtcctgagattccggatgggcatacagcagcaaaactttcgctggctgagacatcatccccctcccggtatggtttttgtgtatagtcgctgttttgggctaccattgcgcccggtgcggcagctcgcccatacattacattatcataatgataagttaacatagtctgaacatacggcaccttatgattgttttctccagcttacaaattcgtcgcggcgtgcgcgtcctgctggataatgccaccgccaccatcaaccctgggcagaaagtcggcctggtgggtaaaaacggctgtggtaaatctaccctgctggcattgctgaaaaatgaaatcagcgccgacggcggcagctacacctttccgggaagctggcaactggcgtgggtgaatcaggaaacgccggcgttaccgcaagcggcgctggaatatgtcattgacggcgaccgtgaatatcgtcaactagaagcgcagctacacgacgccaacgaacgtaacgacgggcacgccattgcgaccattcatggcaagctggatgctattgacgcatggagtattcgctcccgtgctgccagcctgctgcacggcctcggtttcagcaatgaacaactggagcgcccggtaagtgatttttccgggggctggcgtatgcgtcttaaccttgcccaggcgctgatttgccgtagtgacttgctgctgctcgacgaaccgactaaccacctcgatctcgatgccgttatctggctggaaaaatggctgaagagctatcagggcacgctgatcctgatctctcacgaccgcgacttcctcgatccgatcgtcgataaaattattcatatcgaacaacaaagcatgttcgagtacaccggcaactacagtagctttgaagtacagcgcgccacccgtctggcgcagcaacaagcgatgtacgaaagccagcaggaacgcgtagcgcatctgcaaagttatatcgaccgtttccgtgccaaagccaccaaagcgaagcaggcccagagccgcattaagatgctcgagcgtatggagctaattgcccccgcgcacgtcgacaacccgttccgctttagcttccgcgcgccggaaagcctgccaaatccgttactgaagatggaaaaagtcagcgcgggctatggcgatcgcattattctcgacagcattaaactgaacctggtgcccggcagccgtattggtctgttaggccgcaatggcgcgggtaaaagcacattaatcaaactgttagccggtgaacttgcgccagtcagcggtgaaattggtctggcgaaagggatcaaactcggctacttcgcccagcatcaacttgaatacctgcgcgccgacgaaagtcctattcaacatctggcacgtttagcgccgcaggagctggaacaaaaactgcgtgactacctcggcggctttggtttccagggcgataaagtaaccgaagaaacgcgccgcttctccggtggggaaaaagcccgcctggtgctggcattaattgtctggcagcggccgaatctgctgctgctcgacgaaccgactaaccaccttgacctcgacatgcgtcaggcactcaccgaagcattaatcgagtttgaaggcgcgctggttgtcgttagccacgaccgtcatttgctgcgttccaccactgacgatctctacctggttcacgatcgtaaagtcgaaccgttcgacggcgatctggaagattatcaacagtggttgagcgacgtacaaaagcaggaaaaccagaccgacgaagcgccaaaagagaatgcgaacagcgcccaggcacgtaaagatcagaagcgtcgggaagctgagctgcgtgcgcaaacccagccactgcgtaaagagattgcccgtctggaaaaagagatggagaagctgaacgcgcaactggcgcaggcggaagagaaactcggcgacagcgaactgtatgaccagagccgtaaagcggagttgaccgcctgcctgcaacagcaagccagcgccaaatccggcctggaagagtgcgaaatggcatggctggaagcccaggagcagcttgagcagatgctgctggaaggccaaagcaactgatggcgcagataacgacgaccgatgccaatgaattcagcagcagtgctgaattcatccccatgcgcggctttagcaattgtcatctgcaaaccatgctgccgcgtctgtttcgtcgtcaggtgaaattcaccccgtactggcagcggctggagttgcccgacggcgattttgtcgatcttgcgtggagtgaaaaccctgcacaggcgcaacataaacctcgtctggtggtgtttcacgggctggaaggcagtctcaacagcccttacgcccacggtctggttgaggcggcgcaaaagcgcggctggctgggcgtggtgatgcattttcgcggatgcagcggtgaaccaaaccgtatgcaccgcatttaccatagcggcgaaaccgaagacgccagttggtttttacgctggctgcaacgcgaatttggtcatgcgccaacggctgccgtcggctatagcctcggcggtaatatgctggcctgtttgctggcaaaggaaggcaatgatctcccggttgatgcggcggtgattgtctctgcgccgtttatgctggaagcctgtagctatcatatggaaaagggcttttcccgcgtttatcagcgttacttgctgaacctgttaaaagccaatgccgcgcgcaagctggcagcctaccccggaacgctgccgattaatctcgcgcagttaaaaagcgtacgtcgcatccgtgaatttgacgatctcatcaccgccagaattcacggctacgccgacgctatcgactattatcgtcagtgtagcgccatgccgatgctgaaccggatcgccaaaccgacgctgattattcacgccaaagacgatccgtttatggatcatcaggtgatcccgaaaccggaaagtctccccccgcaggtggagtatcaactgactgaacatggcggtcatgttggctttattggcggtacattacttcatccgcaaatgtggctggagagtcgcattcctgactggttaacaacgtatctggaggcgaaaagttgttgatattaacgtatctggaggcgaaatcatgttgattccgtggcaagacctctcccccgaaacgctggaaaatttaattgaaagctttgtgttacgtgaaggcaccgattatggtgaacatgagcgtacacttgaacagaaagtcgccgacgtcaaacgccagctacagtgcggagaagcggtgctggtatggagcgagctgcacgaaacggtcaatattatgccgcgcagtcagtttcgcgaataacctgcaaccgtcggcggacgagataataatgatagctaagtcatggagttactatgtctgccaaacatccggtcattgcggtaacaggatccagcggcgcggggaccaccaccaccagcctcgcgtttcgtaaaatattcgcgcagttaaatctgcatgcagctgaggtggaaggcgacagttttcaccgttacacccgcccggaaatggacatggcgatccgcaaagcgcgcgacgccgggcggcatatcagctacttcggccccgaggctaacgacttcggcctgctggaacaaaccttcattgaatacggtcagagcggcaaagggaaatctcgcaaatatctgcatacctacgacgaagccgtaccgtggaatcaggtaccggggacattcaccccctggcaacctttaccggaacccactgatgtactgttttatgaaggtttacacggcggcgtagtcacgccacagcataacgttgcgcagcatgtggacttactggtcggcgtggtgcctatcgttaaccttgagtggattcaaaaactgatccgcgacaccagcgagcgcgggcacagtcgagaagcagtgatggacagtgtagtgcgtagtatggaagactatatcaactacatcacaccgcagttttcccgcacccatcttaacttccagcgcgttcccaccgtcgacactagtaacccgttcgcggcaaaaggtatcccgagcctcgatgaaagctttgtggtgatccattttcgtaatctggaagggatcgatttcccctggctgctggcgatgttgcaaggcagtttcatttcccacatcaatacgttagtggtaccgggcggcaaaatgggtctggcaatggaattaattatgctgccgctggtgcaacgattgatggaaggaaagaaaatcgagtaactctgctattacgccggataaaatactatccggcttcacaacgggatagttaagtcacgcggcaaccacttcatagctgtgagtaatattcaccgctttttccagcatcaacgccacactacaatatttctcggcagagagatcaaccgcacgcgcaaccgctgcgtctttcaggtcgcgaccggtgacgataaaatgcagattaatgtgcgtaaacaggcgtggtgcctcttcgcggcgttcagaggtcaattttacttcacaatcgaccacatcctgacgccctttttgcaggatgctaaccacatcgatggcactgcaaccacccgccgccatcaacaccatttccatcggacttggtgctttatcgccactgttgccgtccattaaaatctgatgaccagaggcggattcgcccagaaaagttaacccttcgacccacttcactcgcgcttgcatttttgctactccactgcgtcaattttcctgacagagtacgcgtactaaccaaatcgcgcaacggaaggcgacctgggtcatgctgaagcgagacaccaggagacacaaagcgaaagctatgctaaaacagtcaggatgctacagtaatacattgatgtactgcatgtatgcaaaggacgtcacattaccgtgcagtacagttgatagccccttcccaggtagcgggaagcatatttcggcaatccagagacagcggcgttatctggctctggagaaagcttataacagaggataaccgcgcatggtgcttggcaaaccgcaaacagacccgactctcgaatggttcttgtctcattgccacattcataagtacccatccaagagcacgcttattcaccagggtgaaaaagcggaaacgctgtactacatcgttaaaggctctgtggcagtgctgatcaaagacgaagagggtaaagaaatgatcctctcctatctgaatcagggtgattttattggcgaactgggcctgtttgaagagggccaggaacgtagcgcatgggtacgtgcgaaaaccgcctgtgaagtggctgaaattagctacaaaaaatttcgccaattgattcaggtaaacccggacattctgatgcgtttgtctgcacagatggcgcgtcgtctgcaagtcactagtgagaaagtgggcaacctggcgttcctcgacgtgacgggccgcattgcacagactctgctgaatctggcaaaacaaccagacgctatgactcacccggacggtatgcaaatcaaaattacccgtcaggaaattggtcagattgtcggctgttctcgtgaaaccgtgggacgcattctgaagatgctggaagatcagaacctgatctccgcacacggtaaaaccatcgtcgtttacggcactcgttaatcccgtcggagtggcgcgttacctggtagcgcgccattttgtttcccccgatgtggcgcagactgatttatcaccccgatatcaactatgcacttcgacaaacgctggtgctatgtttgcccgtggccgttgggttaatgcttggcgaattacgattcggtctgctcttctccctcgttcctgcctgttgcaatattgcgggccttgatacgcctcataaacgttttttcaaacgcttaatcattggtgcgagcctgtttgccacctgtagcttgctgacacagctactactggcaaaagatgttcccctgccctttttgctgaccggattaacgctggtacttggcgtcactgctgagctggggccattgcacgcaaaattgcttcctgcaagcctgctcgccgccatttttaccctcagtttggcgggatacatgccggtctgggaaccgttgctcatctatgcgttgggcactctctggtacggattgtttaactggttttggttctggatctggcgcgaacaaccgctgcgcgagagtctaagtctgctgtaccgtgaactggcagattattgtgaagccaaatacagcctgcttacccagcacaccgaccctgaaaaagcgctgccgccgctgctggtgcgccagcaaaaagcggtcgatctaattacccagtgctatcagcaaatgcatatgctttccgcgcaaaataatactgactacaagcggatgctgcgtattttccaggaggcgctggatttacaggaacatattagcgtcagtttgcatcagccggaagaggtgcaaaagctggtcgagcgtagccatgcggaagaagttatccgctggaatgcgcaaaccgtcgccgctcgcctgcgcgtgctggctgatgacattctttaccatcgcctgccaacgcgttttacgatggaaaagcaaattggcgcactggaaaaaatcgcccgccagcatccggataatccggttgggcaattctgctactggcatttcagccgcatcgcccgcgtgctgcgcacccaaaaaccgctctatgcccgtgacttactggccgataaacagcggcgaatgccattacttccggcgctgaaaagttatctgagtctaaagtctccggcgctacgcaatgccggacgactcagtgtgatgttaagcgttgccagcctgatgggcaccgcgctgcatctgccgaagagctactggatcctgatgacggtattgctggtgacacaaaatggctatggcgcaacccgtctgaggattgtgaatcgctccgtgggaaccgtggtcgggttaatcattgcgggcgtggcgctgcactttaaaattcccgaaggttacaccctgacgttgatgctgattaccaccctcgccagctacctgatattgcgcaaaaactacggctgggcgacggtcggttttactattaccgcagtgtataccctgcaactattgtggttgaacggcgagcaatacatccttccgcgtcttatcgataccattattggttgtttaattgctttcggcggtactgtctggctgtggccgcagtggcagagcgggttattgcgtaaaaacgcccatgatgctttagaagcctatcaggaagcgattcgcttgattcttagcgaggatccgcaacctacgccactggcctggcagcgaatgcgggtaaatcaggcacataacactctgtataacagtttgaatcaggcgatgcaggaaccggcgtttaacagccattatctggcagatatgaaactgtgggtaacgcacagccagtttattgttgagcatattaatgccatgaccacgctggcgcgggaacaccgggcattgccacctgaactggcacaagagtatttacagtcttgtgaaatcgccattcagcgttgtcagcagcgactggagtatgacgaaccgggtagttctggcgatgccaatatcatggatgcgccggagatgcagccgcacgaaggcgcggcaggtacgctggagcagcatttacagcgggttattggtcatctgaacaccatgcacaccattagcagcatggcatggcgtcagcgaccgcatcacgggatttggctgagtcgcaagttgcgggatagcaaggcgtaatgcaggctaaaccatcggataaggcattcacgccgcatccgacatcttttgcctgatgcttcgtatttacgccccaaccaccttcgccaccgcgtgggcgaaacgttgcatcccttcatcgatatccgcatcttccaccaccaggctcggtgcaaaacgcatcacatccggtccggcattcagcaccattacgccagcctctgcgcccgcatacaggaaatcacgcgcccgacctttgtactgtggtttcagctctgcgccaatcaacagccccataccgcgaatatcgctaaatacatcgtactgctgatcgatcttctgcagatggtcaacaaaacgctggcgtttcgcctgaatgccttccagcacttcaggggtattgatgatatcaaacgccgcccccgctactgcacaggccagaggattaccgccgtaggtggaaccgtgagaaccaggatgaaacgcagaagcaatttccgccgtggtcagcatggcgctaatcgggaagccgccgcctaacgctttcgcagaggtcagaatatccggcgtaacgccgtagtgcatgtaagcaaacaaatcgccggtccgccccatcccgcactgcacttcatcaaacaccaataatgcctgatgttgatcgcacagctcgcgcaagccctgcaaaaactctggcgtcgctgccgtcacaccgccctcgccctggatcggctcaaccaccaccgcacaggtgtgatcatccatcaccgctttcactgcatggagatcgttaaagggaacgtggatgatgtctgccggtttcggcccaaagccgtcggaatattttggctgcccacccacgctaacggtaaacaggctgcgaccatgaaaagcgttatggaaggcaataattttggttttgaacgggctatgacgcacacaggcgtaatggcgtgccagtttaaaggcggtttcgttagcttccgtgccggagttcataaacaccacgcgttcggcaaacgttgcctcaatcagtttacgcccaagacgcagcgccggttcattggtgaaaacgttactgatatgccacagagtttcgccctgggtttttaacgcgttcaccagcgcaggatggcaatggcccaacgccgtaactgcaatgccacccgcgaaatcgacatactccttgccttgctgatcccagattcggctgccctgaccttttaccggaataaactctgccggagcataaatcggcaggatcacttcatcgaaagtcgcgcgtgtaattgctgtttgttcaattgccatctcatgatcaccctgttacgcataaacaaatgtgaaattataaccacaaaatatgcataaaaaatcactaaatggcaatcagaaatcagcgatgcaggaaattagccagcagttgatgtccttgttcgctaagaatactttctggatggaactgcacaccttccagatcccactggcgatggcgaatccccataatctctcgggtttcgctccaggccgtcacgtcaaagcacgctggtaaactgtcaggttccaccaccaggctatggtagcgtgtcacggtaagtggatttgccagcccccgaaatacgccctcaccgttatgtgtaatcgggctggttttgccgtgcatgacctttgcggcgcgcacaactttaccgccaaatgcctgcgccattgcctgatgaccgaggcagacgccaagaatcggcaagcgcccggcatagtggcgaataacgtcaagggagatcccggcttcatctggcgtacaggggccaggactgatgacaattttttgtggtttaagggcgtcgatatccgccagcgtcaacgcatcgttgcgcttaaccagcacatccgcccccagttcacaaaagtactggtagaggttccaggtaaaagaatcgtagttatctataagcaggatcatggcggctccggtacaaaagaaccgcgctattttactcagattccccggcttcgcttaccactttgctaaatatcatctgcagtgcggtgagatcccccattgccccactctgatttgcctgattccaggcctctttttcgataccctgccagctcagttgatatccggcatgaatcgccagttgctcgaagaagatccgctgtgccagaccacttcccacccggaagggatgcagcacgttgatttcacaatagtaatgcgccagccgctcgacgaacttcgctttctccaggccaaccagataaccttcttcctccagatcctgcatcagggcattgccctctttttcgatataagcaaagtggcagaacggcgtatcaccctgataaatatcaacttcacgcagttgccctgcccagtcgaaaatatcctgatacagctggcgatggatagttcgcaaatgcggtaaaccgcgcaccagcggaccaagctcaatggtcgcagcacgcagcgccgtcatttcgtaagcggcctgttccagccgctgctgctggcggatgttcagccggttacgcatgatatcaaggcctggataaagatacggatcgcgcccttcgccgaatttatcgctcatagtgactcctcagctcttcaaggcgcgctaaagcctctgcggcagtaagagtgactaaaggcatctcgacgccttcaagacggcgactggcctgaaaattacgattacgctgaagctcccagagacgggacttttgcttatcggtgagtttcttcacttgatgcctccctgaacgtgtccatttgccacaagtataagcggcaaatccgggttacgccgggagagcagaagcgcgggcaagattgcccgcgcgagaaatcattacggcaggactttagcggaaaggataactaccggtttactcggcacattctggtacggaccaacgtcatgagtcggcacctgggaaatcttatcggcaacgtccatgcctttcaccactttaccaaataccgcgtaaccgaaatcacgctgaccatggtcaaggaaggcgttatcggcaacgttgataaagaactggctggtggcgctgtctttgtcagcggtacgtgccatcgcgatggtgccacgcgtgttgcgcaggccgttatcggcttcatttttgattggcgggtttggttttttctgctgcatctgctcggtgaaaccgccgccctgaatcataaagccaggaatgacgcggtgaaaggtagtgttgttataaaaaccgctgttcacataatcgacaaagttttgcacagacactggcgctttttgtttatccagctccagttcgatgttaccagcactggttgtcaacaatacgtgcgggtcccctttcgctgccattgctgcgggagaaagagcagaaagagcgaaaacagcagccatcgccgccagggtgcttttgaacatgagatttccttaacaaacagagcagaaaaaaagcaagtgaagagattctaaatagccttcaagaacaaggccatccctttacctaattttacgtatctgaaatatatgtaacctgacgatcactttttattccgtgatcaaaatcacctcttaaaatgcaatttagcaaccgattgcaataaaacatttaaacagatcacaaaatcacctaaaatcgcccgctcgcggcatatcccgctatgccattttatttttgaacgcaggccaatcatgactaacagcaatcgcatcaagctcacatggattagctttctctcctacgcactgactggtgcgttggttattgtcaccgggatggtgatgggaaatatcgccgattatttcaatctgcctgtttccagtatgagtaataccttcaccttcctcaacgccggcattttaatctctatcttcctcaacgcctggctgatggaaatcgtcccgttgaaaacgcagttacgttttggctttctcctgatggtgctggcggttgccggtttgatgttcagccacagcctggcgctgttcagcgcggcgatgttcattctcggggtggtcagcggcatcaccatgagcattggtacattcctggtaacacaaatgtatgaagggcgtcagcgcggttcccgcctgttatttaccgactccttcttcagtatggctgggatgattttcccaatgatcgccgcgtttctactggcgcgcagcattgagtggtactgggtttatgcctgcatcgggctggtgtatgtcgctatttttattctgaccttcggctgtgagttcccggcgctgggcaaacatgcgccaaaaacggatgctccggtagagaaagaaaagtgggggatcggcgtactgtttctctctgttgcggcgttgtgctacatcctcggtcagttaggttttatctcctgggtgcctgagtatgccaaaggcctgggcatgagcctgaacgacgcgggcacgctggtgagtaacttctggatgagttacatggtcggcatgtgggcgttcagctttattcttcgcttctttgatttgcaacgcattctgaccgtactggctggtctggctgcgattctgatgtacgtctttaacaccggaacaccagcacatatggcgtggagtattctcgctctgggcttcttctccagcgcgatctataccaccatcatcaccctgggtagtcagcagaccaaagtaccgagcccaaaactggttaactttgtcctgacctgcggaaccatcggtactatgttgacctttgtggttaccggcccgatcgttgaacatagcggtccgcaggcggcactgcttacagcaaacggtctgtacgctgtcgtctttgtgatgtgcttcctgttaggtttcgtcagccgtcaccgtcagcataacaccctgacctctcattaattgctcatgccggacggcactatcgtcgtccggccttttcctctcttcccccgctacgtgcatctatttctataaacccgctcattttgtctattttttgcacaaacatgaaatatcagacaattccgtgacttaagaaaatttatacaaatcagcaatatacccattaaggagtatataaaggtgaatttgatttacatcaataagcggggttgctgaatcgttaaggtaggcggtaatagaaaagaaatcgaggcaaaaatgagcaaagtcagactcgcaattatcggtaacggtatggtcggccatcgctttatcgaagatcttcttgataaatctgatgcggccaactttgatattaccgttttctgtgaagaaccgcgcatcgcttatgaccgcgtacacctcagctcttacttctctcaccacaccgccgaagagctgagcctggtgcgcgaaggcttctacgagaaacacggcatcaaagttctggtcggcgaacgcgctatcaccatcaaccgtcaggagaaggtgattcactccagcgccggacgtaccgttttttatgacaagctgatcatggcaaccggttcctacccgtggatcccgccaatcaaaggttctgatactcaggactgctttgtctatcgcactattgaagacctcaacgccattgaatcctgcgcccgtcgcagcaaacgcggtgccgttgttggtggcggcctgttaggtctggaagccgcaggcgcgctgaaaaacttaggtattgaaacccacgttatcgaatttgcccctatgctgatggcagaacagcttgatcagatgggcggcgagcagctgcgtcgcaaaatcgaaagtatgggcgtgcgcgttcacaccagcaaaaacacccttgagattgtgcaggaaggtgttgaagcgcgtaaaaccatgcgttttgccgacggcagcgaactggaagtcgactttatcgtcttctctaccggtatccgtccgcgcgataagctggcaacccagtgtggtctggacgttgctccgcgtgggggtattgtcattaatgattcctgccagacttccgatccggatatctacgccatcggtgaatgcgcaagctggaacaaccgtgtatttggtctggtagcacctggctacaaaatggcgcaggtcgccgttgaccatattctcggtagcgaaaacgcctttgaaggtgctgaccttagcgccaagctgaaactgctgggcgtagacgtaggcggtattggtgatgcgcacggtcgcacgcctggcgcacgtagctacgtttacctcgacgaaagtaaagagatctacaaacgcctgattgtcagcgaagacaacaaaaccctgctcggtgcggtactggtgggcgataccagcgactacggtaacctgctgcaactggtgctgaacgctatcgaactgccggaaaacccggattccctgatcctgccagcacacagcggtagcggcaagccgtctatcggtgttgataaactgccggacagcgcgcaaatctgctcctgcttcgacgtcaccaaaggtgatctgattgctgccatcaacaaaggctgccacacagttgcggcgctgaaagctgaaaccaaagcgggtactggctgcggtggctgtatcccgctggtcactcaggtactgaacgcggaactggcgaaacagggcatcgaagttaacaacaacctgtgcgaacactttgcttatagccgtcaggaactgttccatttgatccgcgttgaaggcattaaaaccttcgaagaactgctggcgaaacacggcaaaggctacggttgtgaagtttgtaaaccaaccgtcggtagcctgctggcctcctgctggaacgaatacattctgaagccggaacatactccgctgcaggattctaacgacaacttcctcgctaacatccagaaagacggcacctacagcgtgatcccgcgttctccgggcggtgaaatcaccccggaagggctgatggcggtaggtcgtatcgcgcgtgaatttaatctctacaccaagatcactggctcccagcgtctggcgatgtttggcgcacagaaagacgatctgccggagatctggcgtcagctgattgaagccggcttcgaaaccggtcatgcctatgcgaaagcactgcgtatggcgaaaacctgcgtgggtagcacctggtgccgctacggcgttggcgacagcgtcggcctcggcgtggaactggaaaaccgctacaaaggcatccgtacgccgcacaaaatgaagttcggtgtctccggctgtacccgtgaatgtagtgaagctcagggtaaagacgtgggtattatcgccactgaaaaaggctggaacctgtatgtttgcggtaacggcggcatgaaaccgcgtcatgcggatctgctggcggcggatatcgatcgcgaaacgctgatcaaatatctcgaccgcttcatgatgttctacatccgtactgccgacaaactgacgcgtaccgcaccgtggttagaaaacctcgaaggcggcatcgattacctgaaagcagtgatcattgacgacaaactggggctgaacgcacatctggaagaagagatggcgcgcctgcgtgaagcggtactgtgtgagtggactgaaacggtcaatacgccgtctgcgcagactcgcttcaaacacttcatcaacagcgacaagcgtgacccgaacgtgcagatggtgccagagcgcgaacagcaccgtccggcaacgccgtatgaacgtatcccagtaactctggtggaggacaacgcatgagccagtggaaagacatctgcaaaatcgatgacatcctgcctgaaaccggcgtctgcgcgctgttaggtgacgagcaggtcgcgattttccgcccgtatcacagcgatcaggtgtttgcgatcagcaacatcgacccgttcttcgagtccagcgtgctgagtcgcggactgattgcggaacaccagggcgagctgtgggtcgccagcccgctgaaaaaacagcgttttcgcttaagcgacggcttgtgcatggaagacgaacagttttccgtcaaacattacgaagcgcgagtgaaagacggcgtggtgcagctgcgcggttaatgttttaacgggaggcgcaatgcctcccctttttgcatggtcctgtaataatcttcggtatattgcaggacattttttaaactttttgttttattttttgtttttattttttaaaggataatcaaatgtttacagacactattaataagtgtgcggctaacgctgcgcgcattgcacgcctgagcgcaaataacccgctcggcttttgggtcagctccgccatggcgggcgcgtatgtgggtcttgggatcatcctgattttcacgctcggtaatttgctcgatccatccgtacgccctttggtgatgggcgcgacctttggtatcgccttaacgctggtgattatcgccggttctgaactgttcaccggacacaccatgttcctcacctttggggtaaaagcgggcagcatcagccacgggcaaatgtgggcaatcctgccgcaaacctggctgggtaacctggtcggttccgtcttcgttgccatgctctatagctggggcggcggtagcctgctgccggtagataccagcatcgttcactccgtcgcgctggctaaaaccactgcaccggcaatggtactcttcttcaaaggtgcattgtgtaactggctggtttgcctggcaatctggatggcgctgcgcactgaaggggcggcgaaatttatcgctatctggtggtgtctgctggcatttatcgcgtccggctacgagcactctatcgctaacatgacgctgttcgcgctctcctggttcggcaaccacagcgaagcctacacgctggcgggtattggtcataacctgctgtgggtgacgctgggtaatactttaagtggtgccgtattcatgggattgggttattggtatgctacgccgaaagcgaatcgtccggttgcggacaaatttaatcaaactgaaacggctgccggttaattactaaggggtttttacgtggatcatttgcctatattttgccaattacgcgatcgcgactgtctgattgtcggcggtggtgatgtcgcggaacgcaaagcaaggttgctgttagacgcaggcgctcgcttaacggtgaatgcattagcgtttattccacagttcaccgcatgggcagatgcaggcatgttaaccctcgtcgaagggccatttgatgaaagccttctcgacacctgctggctggcgattgcagcgacggatgatgacgcgcttaaccagcgcgtcagcgaagccgctgaagctcgtcgcatcttctgtaacgtggtcgatgcgccgaaagccgccagctttattatgccgagcattattgaccgcagtccgctcatggtagcggtctcctctggcggcacctctccggttctggcacgcctgttgcgcgaaaaacttgaaagtctgctgccgttacatctgggccaggtagcgaaatacgccgggcaattacgcgggcgagtgaaacaacagttcgccacgatgggtgagcgtcgccgtttctgggagaaattgttcgttaacgaccgcctggcgcagagcctggcaaacaacgatcagaaagccattactgaaacgaccgaacagttaatcaacgaaccgctcgaccatcgcggtgaagtggtgctggttggtgcaggtccgggcgatgccgggctgctgacactgaaaggactgcaacaaattcagcaggcagatgtggtggtctacgaccgtctggtttctgacgatattatgaatctggtacgccgcgatgcggaccgtgttttcgtcggcaaacgcgcgggataccactgcgtaccccaggaagagattaaccagatcctgctgcgggaagcgcaaaaaggcaaacgcgtggtgcggctgaaaggtggcgatccgtttatttttggccgtggtggcgaagagctggaaacactgtgcaacgcgggtattccgttcagcgtggttccgggtattaccgcagcttctggttgctctgcctatagcggtattccactcacgcatcgcgattatgcccagagcgtacgcttaattaccggacacttaaaaaccggtggcgagctggactgggaaaacctggcggcagaaaaacagacgctggtgttctatatggggttgaatcaggccgcgactattcagcaaaagctgattgaacacggaatgccaggcgaaatgccggtggcaattgtcgaaaacggtacggcagtcacgcagcgcgtgattgacggtacgctcacacagctgggagaactggcgcagcaaatgaacagtccaagcctaattattattggtcgggttgttggcctgcgcgataaactgaactggttctccaaccattaatttaacccgggccagagaattctggccttcttaatgactctttttatatattcagcaaataaaacatagccccttaataaatattatctgctaatgggttatattcaccgttacagcgacttacaaaattaagtcattcgctcactgacgccaattaaatattcctgtatcgttcttaacgagcagtctgcttatattcatataatcaatgaatattaattaatatataatacatagggaatgtaaatgaacaaatttattaaagttgcactggtaggtgcagtactggctacgttaactgcatgtactggtcatattgaaaaccgtgataagaactgctcttacgactacctgctgcacccggcaatttctatttctaaaatcattggcggttgcggtcctactgcacagtaagtctctgacagaaatcggctaacaccggtttaattgcccgacgccctctggattttccgagggcgtatttgtttctatgtccttcttgcccccgcccgtaaaaatattttcactttaaattcaatttgataactacatccattagccacagcgcgatcctgtgcgaaattttgtgatcttcctccacattacataacatcatatgttgttatattcatcatgcattgtcatgttaccttttaaatgactgcaaactctcccctacaacgtattggacaagaaaaaggtatcgctatgggaagccaggaactccaacgcaagctcggattttgggccgttcttgcaatcgccgtcgggacaaccgtcggctccggtatttttgtatctgtgggtgaagtggcaaaagcagcgggcacgccgtggcttacggtgctcgcgtttgtcattggcgggttaattgtgatcccgcaaatgtgcgtctatgcggaactatccaccgcttatccggaaaatggcgcagattatgtttatctgaaaaatgccggaagccgaccgctggctttcctctccggctgggccagcttctgggccaacgatgcgccgagtttgagcattatggcgctggcgattgtcagcaatcttggctttttaacgcctatcgatccgttgctcggtaaatttatcgccgccggattaattatcgcctttatgttgctacacctgcgctccgttgaaggcggcgcagcgtttcagacgctaattaccatcgccaaaattatcccgttcactatcgtcattggccttgggatcttctggtttaaagcggagaattttgccgcccctaccaccactgcgattggcgcaacgggcagctttatggcgctgctggcggggatctctgccaccagttggagctataccggcatggcctctatctgttatatgaccggcgaaattaaaaaccccggaaaaaccatgccacgagcgctgattggttcctgtctgctggttctggtgctctacaccctgctggcgctggtgatttccggcctgatgcccttcgacaaactcgccaattctgaaacgccgatttccgacgccctgacctggatccccgcactcggcagcaccgctgggatctttgttgccatcacggcgatgatcgtcattcttggtagcctttccagctgcgtgatgtaccagccgcggctggaatacgcgatggcgaaagacaacctgttctttaaatgcttcggccatgtgcatccgaaatacaacacgccggatgtctccatcatcctgcaaggggcgctggggatcttcttcatcttcgtttccgatctcaccagcctgctgggttatttcaccctggtgatgtgtttcaaaaataccctcaccttcggctccatcatctggtgtcgtaaacgcgacgattacaaaccgctgtggcgtactccggctttcgggctgatgaccaccctcgccattgcgagtagcctcattctggtcgccagtacctttgtctgggcaccgattcccggccttatctgcgccgtcatcgttattgctactggtctgcctgcttacgccttctgggcgaagcgtagccgccagctcaacgctttgagctaatgttatctggagaaaataaaatgttggatattgataaaagcaccgtggactttctggtcaccgaaaatatggttcaggaagtggaaaaagttctcagccatgacgttccgctggtgcacgccatcgtggaagagatggtgaagcgcgacattgatcgtatttatttcgttgcctgcggaagcccactcaacgcggcgcaaacggcgaaacatctggcggatcgcttttccgatcttcaggtctacgccatttccggctgggagttctgcgataacaccccgtatcgcctcgacgatcgttgcgcagtaattggcgtttctgactacggtaaaaccgaagaggtaatcaaagcgctggagctgggccgggcctgcggcgcactcactgcggcgttcaccaaacgcgcggatagcccgattaccagcgcggcggaatttagcattgattatcaggccgactgtatctgggaaattcacctgccgctctgctacagcgtggtgctggagatgatcacccgcctcgcgccgaacgcggaaatcggcaagatcaaaaacgatctcaagcagttgccgaatgcgctcggtcatctggtacgcacctgggaagaaaaaggccgccagcttggtgaactggccagccagtggccgatgatttataccgttgctgcgggtccgctgcgtccgctgggttacaaagaaggcattgtaacgctgatggaatttacctggacgcacggctgcgtgattgagagcggagagttccgccatggcccgctggagattgtcgaaccgggcgttccgttcctgttcctgctcggcaatgatgaaagtcgccacaccaccgaacgcgccattaactttgttaaacagcgtactgacaacgtgatcgtcatcgattacgccgaaattagccaagggctgcacccgtggctggcaccgttcctgatgttcgtgccaatggagtggctctgctactacctgtctatttacaaagatcacaacccggatgaacgccgctattacggtggtctggtggaatattaatccctctcccggcccggcaacgggccggatttacgcaaggagttacccgatgaaaacaggtatgtttacctgcggccaccagcggctgcctattgaacacgcatttcgtgatgcaagcgagctgggttacgacggcatcgaaatttggggcggtcgcccgcacgcgttcgcgccggacttaaaagcgggcggcatcaaacaaatcaaggcgctggcgcagacgtatcagatgccgattatcggctatacgccagaaaccaacggctatccgtataacatgatgctgggcgatgaacatatgcgtcgcgaaagcctcgacatgatcaagctggcgatggatatggcaaaagagatgaacgcgggttatacgctgatttccgcggcccacgcgggctatctcacgccacctaatgttatctggggacggctggcagagaacctaagcgaactgtgtgagtacgcggaaaacatcggcatggatctaatcctcgaaccgttaacgccgtatgaaagcaacgtcgtgtgtaatgctaatgatgtgcttcatgcgctggcgctggtgcctagcccgcgcctgttcagcatggtcgacatttgcgcgccgtatgtccaggcggaaccggtgatgagttatttcgacaaactgggcgataaattacgtcatctgcatattgtcgacagcgacggggccagcgacacgcattacattcctggagaaggcaaaatgccgctgcgggaactgatgcgcgatattattgagcggggctatgagggttactgtacggtggagctggtgacgatgtatatgaacgagcccagactctatgcccgccaggcgctggaacgctttcgcgcgctgctgccggaggatgagagatgaaaaccctggcgacaatcggcgataactgcgtcgatatctacccgcaactgaataaagcgttttctggcggtaatgcggtcaatgtggcggtgtactgcactcgctacggcatacagccgggatgcattacctgggtgggtgacgatgactacggcacaaagctgaagcaggatctcgcccgcatgggcgtcgatatcagccatgtccatacgaaacacggcgttaccgcacaaactcaggtggaactgcacgacaatgatcgcgtttttggcgactacaccgaaggcgtgatggccgactttgccctgagtgaagaggattacgcctggctggcgcagtatgacattgtgcacgcggcaatctggggacatgcggaagacgcattcccacagctgcacgctgcgggcaaacttaccgctttcgacttctccgacaagtgggacagcccgctctggcagacactggtgccgcatctcgattttgcctttgcctccgcaccgcaagaagacgaaacgctgcgtctgaagatgaaagcgattgttgcccgtggcgcaggaacagtgattgtcacgctgggtgaaaacggcagcattgcctgggatggcgcgcagttctggcgtcaggctcctgaaccggtgacggttatcgacaccatgggtgccggagatagcttcattgccggattcctttgcggctggtctgcggggatgacattaccgcaggcgatagcgcagggaacggcgtgcgcggcgaaaaccattcagtaccacggtgcctggtaagtataacgttggcgtgagcatcttcacgccaacgtgctgttacttgccggaaaacgaccctataatccgagtaattcattctttatttcagggtcgattatgagtgctacggaccgctactctcatcaactcctctacgctaccgtccgccagcgactgctggatgatatcgcgcagggggtttaccaggccgggcaacagatccctaccgaaaacgagctttgtacacaatataacgtcagccgcattaccattcgcaaagccatcagcgacttagtggcagacggcgtactgatccgctggcagggaaaaggcacctttgtacaaagccagaaagttgaaaacgccctgcttactgtcagtggttttaccgattttggcgtcagtcaaggcaaggcgacgaaagagaaagtgatcgaacaggaacgggtcagcgccgcgccgttttgcgaaaagctgaacatccccggaaacagcgaagtgttccatctctgccgggtgatgtatctcgataaagagccgctgtttattgatagtagttggatcccgctgagccgttatcctgactttgatgagatttacgtcgaaggaagctccacctatcagttatttcaggagcgttttgacacgcgagtggtcagcgacaaaaagaccatcgatatctttgccgccacccgcccgcaggcaaaatggctgaaatgcgaactgggcgaaccgttgtttcgcatcagcaaaatcgcctttgatcagaatgacaaaccggtgcacgtctccgaactcttctgccgcgccaatcgcatcaccttaactattgataataaaagacattaaccgtaggccggataagatgcgccagcatcgcatccggcgatgctggcgcgttgaattttacatcccgtacgttcccctcaccctaaccctctccccaaaggggcgaggggaccgttcagtacggaatttagcttgacggtgctatccagcattaaatactggcaatactctcacgcaaaatccgcagcaccgtctcttcaccgctgcgattcgggttaatgcgaatcgcacaatgttcactttgtggattcgcctggcgaaacgttccggaaaggcgataaaagagcggcgggatttcatatttgctctctgcacccaccgggtaaggcaaggcaccgcgcttttgcgcctcttccagcactctggcggcaatcggctgatgaaactcgacaatcaacaccttgctctgcgcattagcaatcaccgcgcttttcacttccggcaccgcaccaccgttaagcaaagccagcaaccgttcagatacccctgcctgcaccgcgtgcatcactggcgcaaacaccagaccacgcaatacttccagcgcctgtgcgccctggatctggctaccgccggagtaaagcgtggcgcgaatacggttgataacatcagcatcgccgaccactgcaccaacaccctctggcccaaatagcttgaagcaggaaaatgtgctgacattcgcgccgcattcacagccgattcgagccaccttcatcaccgcatagttgtcatcggttaacgctggaacacctgccgcgcgcaacgttgccagcacatctgccagcacgtagctgtcctgcggctgctggcgcgtatgctgcaccagcgccgcatccggttgttgctcgtcgacgacctgcttcagtgcgctcaggtcattgaaatcaacagtaataagcgtcagccccatctgctcaataataacccgtgtcgtcgggtaaacaggcgcgtcatgcaccagaagacgctgccccggtttgagcaaagccgccagcccggcgcgaatcgcgccagtccccgcgtcctgcaccagcgccgcagcctgtgcgtgaaatgcatcagccagcacctgttccacacgctgggtaacgcgcggttgattcagtcctggcgttaagcctaaatcaccgccagtaagaaactcgctgccggggaaatggcgacaaatgctatccaccagcgcaaactgcttttgctgcgcctcaataatcgtcaggctttgcagaggaaacgtcttcataggtgccttccttaagccggaacgaacaggccaagccagtaaagaacattcagcagaataccggtgatcattactgccacgaccggtgccgccattttctgtaccggacggcccagggattcgttgaggaagtaaatggcaaccgcgatagagaatccggtataacccgccatcttaattgctgcgaaaatgctaccgaccagcagcgccacttccatcagcatattcatggcgttacggatgttatcgctcgcattacgcacgctcgggtagcgtcccagccatttgccgatgctacgaagcagcaagacttccgcgctaataaccactgcgcctaataccgctgcaaccatcggattcgggctgagatagtccaccgcataaacaaaggtaaagcccgcaactgcatacacacccgttgctaacgcggtggtggcaatcaacggcacaaaccccagtccgcgcataaattctgccagagccgcctgattaatcagcgtttggctttgttccggcgttacgcctgcggaatatgctttctccagtgtgaagatgctcacttcactgccagcaaaaatcttcatgctggcaacggcggcaatcaatgctcccacgatggcgatatagggtaagtttttgataatccgactcgtgcgttcttcaaacacgctaagcccgctggcatcaatgtcattttcatcacgatgacgcaggtcgtgagttatcgcgatccccagcagcatcaccatgccaataaagatttcgatggattcagggttaagatgtgggaaatagcgcacgactaccacacgggtcatcagtaccaccacggcggcgatcagactttgcttccagccaaactggtagaaaatcgccaccagcgggaacagtgcaaaagcactaaccaccgggctgcttaattcccccaggctacctaatacatccaccggcagcgcggtcagcagctggtttactggcaacaggcaagtaaggatcaacacgccccagatagcgccaagaccaaacgccatcaggctgtttatcgccaggacgccgaggatatcggtaggaagaaagagtaaccatgcgttgagcagcccggttttcagggtaaaagagatccccacgctggccacaaaaccaatgctcagaccaaaagcgatactccccgcctcgcgacggttcatatagccttcaatcagttgcggcaggatcgggcggatgccgtcatgaaaaacagccgcgctgcgatgcgccagaaggcttgtcatacccgtcaggcacgccaccacgataatctgaatatacagatccatagtcgtgccttttatttcagatggttaatcagcatcggaatcgcgtgttcgacgtgctcaacggaaaggccaaacgccacttttccttcagcgatcattttggcgatatgctcgtctttcgctttaatgcctggtttggcaatggtgcaacttttgttatagcctatcaccgcgatggcaatgctcaatgccgcgcccgcaccggtattacacgcgccgatgtaataatccagttgcccggatttcaccttcattgccgcttccatgtcgttgtgaatgaaaacttcaaaacagccaggagccgtcgcttcaatagtttttttaatctgctcacgctgtaagcctgcaacgccaatctttttcatgagtctgtccttattggaaaaattgagagggattttcacgtaacatcacatccacatcggcctgactgaatccactctggcgcaattgcggaataaaggtggttagtaaatagtcatagccataaccaccgttggcttttaaatgggagcggcgcgtaatatccatgctcagcatgacgcggttcagcaacccacggtcgcgtagcgcatgaagcatcgcaatacgcttttcgtccgggtagtaactgttcttgccgatggtgtcgaactgcacgtacgcgccgagatcgatcatcttcaaaatgttgtcgaggttgtctttcagatcgcagtgaccaacggtgacgcggctaagatcaaccccgtgggcttgtagcaacgccagttgctccagccccatcgtgctgaagctcgtatgcgtggagatcgggcgtccggtctggttatgcgccagcgcagcggcaataaataccttctcttccagcggcgtaatctttccttcgctggtgccgatctccgcgatgatcccggctttcagctccgtgccatcgataccctgttcaatttcatcgaccatctcctgcgccagttcctgcacgctgcgggtcgccacatgttccgggaaaaacgcgtcctggtaataaccggtacaggccaccacgttgatccccgtctcgcgcattacatcaagcataaattgcgcattgcgccccatgtaacggttggtcatctcaatcacattacgcacgccccgggtcatcaggtcgttcatctcctggcaaatgaacgcatactgatcaaggcggcagtccacgttgtttttaaagccggagagatcaatatgcagatgctcatgggcgagggtgtaacccgtcggatcaaaactcatagggtgtctcctgcaaaccggagggaggaaagaaaagagcgaccattttgtggcggtggcgcgcggaaaaattcacacacggtagcccccacatcagaaagcgtggtgcgcacaccgagctgcgtagcgatcatcccttgctgataaaccagcactggcaccacttcgcgggtatggtggctgtgaccaatggtcggatcgttgccgtgatccgccatcacgaccaggcaatcatctggctgcatcgcctcaacaagccgggcaaggttacggtcaacgacctgcaaacgttcggcataacgtgcgacgtcttctgcatgaccagcgaggtcggtttcctgaatgttggtgcaaataaacgccgtcggatgggtgttaaattcgttgagggtgatatccataatccgctggctatccaccagattttgccagctcacgccataaggattgttgacgatatctgccaccttacccaccagcacggttggcacgcctgcttcatacagtttttgtggcacctgcactttttcatcgacgccatagcccatatgcacgacctggaaaccgttgtcataagcgccagaacgcggcgcattgataccaataaagcgcccttctttgctttctgcggcatcgagaatgcgttgactgtcggttaacaggccaccaaatgtaatgacccgaccgacctgtacctgctcacgcacgatacgaccaattttgattgcgtcgtcaaaagagatcacagagagattggcggtaatgttatagacctggcctaaatccgcctcgagattatcgccaatcgcaaccgcctgattgacccacagaaattgcagatcatcgccacggcgctccacctgccagccagcggaaactaatgcctgctcaacacggtcaatcacatcgcgaaaaggcatccgcagcggcggtaacgggcgcgtgcctaaaatttcctgatgccccataaaggtatcgccaccttcatgttgcagctctgccacgccccaggttgcggaatcactcggctgcatatcgcctggcgcataacccaatgcgttgattagccccagcgtctccagcgttggtagctgcaaatgcggcaactggctcaggatgtgaccacatgtattcgctcccgcatcttgcggacgcaccagcgtgacatctttcattgcccctacgccaaagctatcaatcactaacaccacaaatcgcgccattacgcccccagagagtttccaagactgtcataacgaccgacgatttccggttcgccacgatgaataccggacaccagcaccacatcgctacgggtgacaaaaatctgcgtgcgaaaacagagcaccactgcactgcttaccggaaactcgcctgccagcggcagggtgtagtcgatactgctgtcatccacagttttgagattggtttcagtaatcttttgattttctggcgtaaacaccaacgcatgttgcgcatgaccacgacgatagtaaccgccgccgtagcagtagctgtcgccacggaaatgatgggagatttcacttaaccagagcatcgcgatacgttcaggctgatcgccctgctggtttgccggaatagtgcccgtcagcgcatgaccgggttcggcatgagtcacaccgtattgcgccagtaatggcaggctagtgcagctggtcgcactaggcgcgttcagttgctcaagtgcaataccagatttcgccagttgatcccgtgcctgtatcagcgtgtgaagattcggtgtcggcaaaacttttccgacagcctcatcccaaagcaggcaagggaaatgggtaagtccggctaaatgcagccctggcagattctggatttcggcgacaatctccggcaacaccttgagggcaaaaccgctctcctggcccggataaagaaaatcatcgtcgctataaactttaagcagcacagactggattcgcccggccttcaccgccgccgcagaaacttcccgcgctttgtcgagagtaaacacggtgatgacgtcggtgccctgttcaacggcgtcagcaacctgatgacaagggatttgtaccagatgcccctgatgcgccacaggcaaaccagcgcggcgcatgactcgcgcctctttgtaatccaccgccacaatgccgctgtagcctaatgccagcaatttttccgccagccacggattacgaccaaactgcttggtcatcagatacagttcaatgccgtaaagccgcgccgtctcaatcagccgcttaccgttttccagtatctgatccacgtcgatcacccagctgtccggggcgatcttgccctgctgccacaggcttagtgcggcggaaatcagcgccgggttctggcgtttcaatgcttctacaaacatcttgttgcctcgtttctgttccttgaattaaatattcatttttttgaatatttaggttgtgcgacgtggatttgtcgggagcttcaaacctcttcgttagcagccatccataatccataaaggttggccagcaaatagccttcttcacacgggttaacttccagtgcgaattccttcaacaacacctgatgcaattgcacaacggcttgccagtggctggattgcgccagttctgccagcaactcgttatccagcggctctatttcttcaccacggcgactgcgcatcagtgcactcgccatatgtgtcatcgccatcgttccttgctcactgcgcaccggcagatggcactctgtttccagtacgttgacgacctgcatcatgcctttgcagatgtccttatcaataacgcctgcctcgcaaagcaggttgagtctggtttccatatcagatgcctttcgtttaataactcggttcctgttccccactcactacccgttgttgatgggcgagcagggcgtgtttatctacaacggcacgcagcagttgttgcattgggtaatcatcgactcgcgtcaggaccacggcttcggtggcctgtaaaaatcgcggatcgtctgtgagcggcgtcgcctctaatcccagcatggtcagttcgttttccgccaccacgttccagatcaccgcatcgacatcgcctttaacaatgcgttgtaaactctcgtgataagagagatcgactcgttccacatcactaccgccaaaaaaaacatcggtcatgattttctgatccgcgctacggttatccagccccacgcgcttcacgtttgcggactcgcctttacggcaaatcaactggtgctcgccaacgtaggtgtgcggccccaactccagcgcgaggcataagcctttttgcgtgagataactttccgccgctagtcggctaaccaccgccatgtcatacacgccattaagcagacactccacgcgaatatccgcgccacgcatgtgcgcatagtaaaaaggaatgccatcaaactgggctttcaatccgctcgccaggccttcgtacaaacgggtatagggcaagggcattgcacataccacgttgttgatatccacatgagtcagcaatgctttgttatccatctcgaccagataactgccattgcgcccacggcgttcaatccgtatcgctccgctactttccagcgttttcaacgcggcctgcgtcaggccaacggaactacggcattcatttgccagctcatctatggttttcaatcgattaccgcacttttcacccaacaaataacgggccagcgtcgtgatgacgacgccttcttttttgataaacgttcgacgcataataaattttcagtaaattgaatatttatatcttcaggaatttgaagataaggcgcaacagcgagatgtggaaacggcgaggcacttcacattttttcggattattgcaaatgaggataaaaaaaccgggtttccccggtttcagagtgatgataaaagcaaaattgcctgatgcgctacgcttatcaggcctacatttccttgcaatatgtgcattactttgtaggccggataaggcgttcacgccgcatccggcatgaacaaagcgcaatttgccagcaatagtgaattacggcttcgccacaaaaccaatcgcttcgtacaccgcttttagcgtacgggaagcgtgcgcgctggctttttccgcgccatctttcatcacctgttgcaggaaggcttcatcgttgcggaaacggtgatagcgttcctgcaattcagtcagcataccggaaacggcatcagccacttcacctttcagatgaccatacatcttgccttcgaactgtttttccagttctgggatgctctggcccgttaccgcactaaggatatccaacaggttggaaacgcccgctttgttctgcacatcgtagcgaactaccggcggctcgtcggagtcagtgaccgcacgtttgattttcttcactacgcttttcgggtcttccagcaggccgataacgttattgcgattatcgtcagacttggacatcttcttggtcggctccagcaggctcattacgcgcgcgccagatttcggaataaacggctccggcaccttaaagatctcgccatacagcgcgttgaaacgctgggcaatatcgcggctcagttcgaggtgctgtttctggtcttcacccaccggtaccagattagtttgatacagcaggatgtccgctgccatcagcaccggatagtcaaacagaccagcgttgatgttctcggcataacgcgcagatttatctttaaactgcgtcatgcgactcagttcgccgaagtaggtatagcagttcagtgcccagcctaactgtgcatgttccggcacgtgggactgaacaaaaatggtgcttttctcaggatcgataccacaagccagatacaaggccagcgtatccagcgtcgctttacgcagcttctgtgcatcctggcgcacggtgatcgcgtgttggtcaacgatacagtaaatgcaatggtagtcatcctgcatgtttacccactgacgcagcgcacccatgtagttaccaatggtcaattcaccactgggctgtgcgccactaaaaacgatgggcttagtcatttttgctttcctgattttcgctatgcggaagccctaatgcgggcagaaggtcatttatagactgataaattacatcaggctggctgagatcgatagcctcgccgtagttatatccgtaggttaagccaacacttgggcaacctgccgcttttgccgcctgaatatcattgcgactgtcgccgacaaacagcatctgttgtggggcaattcccatccgctcagccaccagtaacagcgggtccggatgcggttttttgttttgcacatcatcaccaccaatcaccacgctgaagtatttggcgatatctaaggcttcgagcagcggcgcgacgaacggcgtcggtttgttggtgaccaggcctagcggcaggcctttagcctgcaacgcgcccaacgtatcggcaacgtgcgggaacaaaaacgtcccctcttcggcaacctcgccatagtagcgatcgaacagtttacgcagaatacgtacctgttcttctgccggaatgtcgtcatcaacgggcggtttacccattgttttacgctgagtcgcacgttcctgacgcgcccaggtcaatgcgcgctccatcagaacatctgcgccgttaccaatccaggtaataacgcgttcttcacctgcgacgggcaactccagcgcatacagcgccatatctaccgcagcagcaagaccaggagcactgtcgaccagcgtaccatcaagatcaaaagcgacgccgcgaatatcttcaaacttattcatgacttacctttgccagttcactgcgcatttcatcaatgacttttttgtagtctggctggtcgaagattgcgctaccggcgacgaacatatccgcgcccgccgcagcgatttcgccaatgttgttcaccttcacgccaccgtccacttctagtcgaatgtcaaagccagactcgtcgatacggcgacgtacttcgcgcagtttatccagtgtttgaggaatgaaagactgaccgccgaaaccagggttgacggacatcagcaggatcacatccagcttatccatcacgtaatccagatagctcagaggtgtcgccgggttaaataccagacccgctttacagccattttctttaatcagttgcagcgtgcggtcaacatgctcggaggcttctggatgaaaggtaatgatgctggcaccagcggcagcgaaatcaggcacaatgcgatcgacgggtttcaccatcaggtgtacgtcgataggggcggtaatgccatagttacgcaaggatttcagcaccattggcccaatcgtcagattgggaacatagtggttatccatgacgtcaaaatgcacgacatcagcgccagctgccagggcttttgcggtatcttcacccaggcgggcaaaatcagcgctcagaatactgggggcaatcaaatactgtttcatccgcttctccttgagaattattttttcgcgggactaacgactcctggtttgtacaaagccagcagttcgtccacctttttacgtgtgccgccgttgctgcttatactgcgtcgaactttgacgacatgcaattttgcgcgctgataccactcacgcgttaacatcgtatcgtgattggagatcagcactggaatatggcgctcaaccagaccttcggcgatctccgccagatgcgcttgttgttcaagcgtaaaactgtttgtgtgatacgccgtaaagttggcggtcgcagacagcggtgcataaggcggatcgcaatagacgacggatgcatcatctgcgcgcgccatgctatcggcgtaagactcacaatagaaaaaggcattctgcgctttttcagcgaagtgatacaactctgcttccgggaaatagggttttttgtagcggccgaacggcacgttaaactcaccgcgcagattgtaacgacacaggccgttgtaaccgtagcggttcaaatataaaaacagtaccgcccgacggaacggatcctggcttttgttgaactcttcgcggaactgatagtaaacctcggcgcaatttgtttcgggaacaaacagctcgcgtgcggcctgtacgtactcatcagtacgcatcttcacaatgttatagagactgatcaggtcgctattgatatcggcaaggatataacgagaaaagtcggtgttgagaaacacgctcccggcacctacaaaaggctcaaccagacattcgcccttgggcaaatgccgtttaatatcatcaagcaggggatacttgccccctgcccacttcaaaaaagcgcgatttttcttcatgctgactaactaattacaccttctccggctgtggagaaagctccgacagcatccagcgcttcaggcaactcccgcaacgataaaccattgcgggagataaccttgattacttcagatcggcctgtacctgacgcagcggtttcgcccacgggtttttggcctggacatctgctggcaatgtagataccgcttttttcgcctcttctttgctagcgtacacgccagaaaccaggacataccacggctgaccattacgcgtcgtttcatagacaacgtagtttttcagattctctttcttcgcccaaccgttcaggttgtcgtagttagaggaactgctcagctgcagagtgtaatggctggacggtgcgcttttcaagctaccaacattacctgcggtcttcgccccagcagcgggtgttgctgtggtttgcgccggggatgccgtctgtactggagccgtagtcgccgtctcttttggtgctggcgtagaagtcgcagccggtgccttcgtgctcgccacaggggcagctggttcagtacgcttcggcgtctgtgctaccggcttcggctccgttttcacggttgcttgcggttttttcggttcaatcaccgcctgctgacgagctgggcgcgtagtggacggacgttcagcggtttgcgttttcgccgtgtcacggcttgcattgccattgcgaacaggcgcaaccgttgcgggttcagtcggcaacgtggaattgaccgccacattgttcagctgttgctgattttgtggctgggtcagcgcattgttcaggtcaccctgcacttcaacacgttgttgaccatccgttgccaccggggtttgcccttgagtcggcgtagaagagatcggtggcagagaaacatcctgctgagtattttccgcagacgtggttcccggcgctggctgcacgccattcgcctgatcggtcgcattgccagcaagatcaatactcttctcgccagacgcggtttgatcgctggaagtggtgctgggggcttttagcgcagaaccgataccgatgatcaacagcagtagaaccagaatgccgacgcccatcatcatatactgacgagaagcgggtttactggctgcttttttgcgcttacgcggacgacgctctacgcgctcttcatccacggtttcatcttcggattcgtcaatttcttcttcgatttccggttcctcattgcgctctttttgcgcacgagtcggacggcgatcgtcagtgtcatcaagttcaatatcatcaaaattgatctgcggttcgccacgttcagtacgctcagaacgttcagaagattgacgagaacgaccagtacgacgatcgctgggatcgggtttcagctcgtcttctggtttgaattcatccatttaacaccccactaaaaggttaatgcttaccacgttgcaattaacctgaagctaatagaccgcttgataagcggcctgacctttcttgttgttacgcactttgacaatcggcaatggcgttaagaacaagctcgtggctaacgccgctgcgaacttcactcttaccaattgccaacggaagaattaagcgcatctctcccgcaaggactttcttgtcacgcagcatatgcggtaaatacgcctgcgcggacatttcgcgcggcccattgaccggtaacccagcccgcttgagcagggttataatacgctgcgtttcggcagaactaaactgcccgagacgttcgctcgtccgcgccgccatcaccatacccgcagcgaccgcttcaccatgtaaccaattgccataccccatttcagcttcaatggcatgaccaaaggtgtgtcccagattcagtaaagcacgtaacccggtttcgcgctcgtcggcggcgacaacttctgccttcagttcacaacaacggcgaatacagtacgccattgccggaccgtccagacgcaacaacgcatccagattctcttccagccagttaaaaaacgcaccgtcaagaataatgccgtatttgatgacttctgccagcccgctcgctaactcacgcgggggaagcgttttcagacagtcgagatccaccaccacactagcaggttggtagaacgcgccaatcatgtttttaccgaggggatggttgaccgcagttttgccgccaacggaggaatcgacctggctcagtaacgtcgtcgggacttgaatgaaacggacaccgcgctgataactcgccgccgcgaagccggtcagatcgcccactacgccgccgccaagcgccaccagcgtagtatcgcgaccatgcggtttttgtaacaacgccgtaaagacggtatcgagtacagccaggcttttatactgctcgccgtcagggaggataacgctatcgacgttaacacccgcctgttcaagtacgccgcggaccttatcgagatacagaggagccagggtttcgttggtgaccaacatgacctgctcgccgcttttcagcggtaagaaactagctggttcattaaacaaaccagatgcgatggtaattgggtaactacgttccccgagagtaacgacaatcctctccataacgcgacatccaccttaattactgtacccgcagacgagtgtatataaagccagaattagttgctttccagcatgtgaataatctggtttgcaaccactttagcgctttgatcatcagtacgaatggtcacgtcggcaatctcttcatacagcggattgcgttcattggccaacgcttccagaacttcacgcggcggtgtttcaacgtgcagcaacgggcgttttttatcacgctgcgtgcgtgcaagttgcttttcgatggtcgtttcaagataaacgacaacgccacgagcggaaagacggttacgcgtttcacgggatttcacagagccgccgccagtagccagcacaataccctgtttctcggtcaactcattgatgaccttttcttcgcgatcgcggaagccttcttcgccttctaaatcgaaaacccagcccacatcagctccggttcgtttctcaatctcttgatcggaatcgtaaaattccatattgagttgttgagctaactggcgcccaatagtgctttttccggcacccataggcccaaccagaaagatattgcgtttctctgccattttttcggtactactaagactattcgttaatgataaacccgcttcgctcagagagcgccgcaggacatgaactgaaacctcataagatattgcgagagtcagactgaaaattatctcaatactccagcgggtttggcaactgaataaatcacccatccctctgcatatctggtcgctgcaagcgcgctgccttgctaccaccgctctggcgataaatcaccgggtaagattagcgtaaaaaagacagcaaaatgccgcctgaatgataaatcatcatcatggaacgcaggcagcgaagagcaccaactctcaaatcggtactccttgtatgctaaatacctgcgcgcgtcaaatagatgaaacacgttcagcgtaaaaacattaccgcttttacggctgtttactcactggaaaccagtcgtggcgtgataaacaccactaactcgcgtcgttcatcttcttttccgtcatgacgaaatgattgcccgaaccagggaatgtcgccaagcaacggtacgctatcctgaccgcttttatttttacgggtaaaaatgccgcccagcgccaacgtttctccgcttttgacctcgacctgcgtttcgatctcctgcttatcaatcgccagcacttcgccatcggcctgctgtagcacctgccccggaacgttctggctgatgtgtaatttcagccggatgcgacctttttgtaacaccgtgggcgtgacctccatccccaggacggcctctttaaattccacgctcgtcgcgccactttccccgctggaaacctgatatggaatttcgctcccctgtttaatgctggcaggctgaagatgactggccagcagacgcggactggcgataatatccagctgctgtttttgttcgagcgcggaaagctcaagatccagcaagcgtccgttgatgcgcccaatgttaaaaccgacatgcgttgtcgccgtcgctacggagaggtcgctaccaagcgtggtgacttgcccaacgccaccagcgtgttgcgcatcggccagcgtccatttcacgcctaactcacgcaaacttttttcattaatggtgacaatatgcgcgctcagctcaacctgcccgaccggcagatccatttgcgctacccactgttcaagcgcgcttaacgccgttttgttatctcgtagcaaaaggcgattggtgcgtttatcgacggtcatactccctttggcactcagcagcttctcccccgctttcgccagttctcccgcgtcggcgtattgcagggttatactgcgattttccagcggcagatttgcctgcgcccgcgcctgctccgcctcctggcgggcgatattgttattctgccaggcaatggaatgcacactgagaatgttgccttcctgccgcgttatcagtccggcgcttttcactacagtttgtagtgcctgcttccagggaacatctgttagatgtaagctcaccgtaccgctgacgtctgggctcacgaccaggttcaacttctcctgttcagccagcgcctgcaacacctgagctaccggaacgtcatccaccatcagcgtcactttttgcggctttgccgcctgtacgccgggtatcagcatcaacagtagtgcggctatccattgcttcatttgtatctccttgccgttgccacaaccattgtggcggttcgcagtttgtcccggtacccagcgttagtacgtctggcgtcagctgtaaaattgtccagccgttttccagcacatcgttttgctgcacccgtcgccatttcttttgcccgtcttttattacaccgatgatgcgctcgcctcgccctaccatcccctgatagcgccactggctaagttcgctaatccggcatagatcttccggcggtttaaaagggtcacgcataccggttaaaaggcacaatgcaatacctgccaacaaccagcgtttaaccctcatgcggcgtctccagttgtagcgtgaacaaaagatcatcaccttccacgcttaagctaaaacggctcacgctgacgttgcgctctgccagccgtgtaaatgcgctcggcactgcttcccacagcgttttcaacgccaactcgcctccctgcgcggatggatgccaggaaaccagttgcgcgccggataactgaaaatccagtgggctaaagggcagcgttttttcctcgctgaagggagcggtgtctaccaggcgatacagtgcggcccactgctggtgatgacttgcccgtagtcgaattaatgcgtcgcgctcttcatggtgtgtgctactcagaaaaatgagcgtaactaacatcagcaaccagaatgcccagcaaagctggcggaggcggggacttgtggcgaaccaccagtcaaagaacatgttcatcgctaaccttccttgttaactgatactcaaattgccagcgtccctgcgcatcctgctgcgtggctccccgctgattgagatgaaaagatgcatcctggcggagactcgtttctagtgcgtttaacgcggtaatgcttgttgtcagccccttgatctccagcgttccctgctgccagcttatcgttgtcagccaggcgtgctcgggtaaaagcgccgccagtgcttccagcgcagattgccagtcgcgggtaaattgtcgctggcgctgccgttggctacgctgttcgcgtaactgctgttgctccagcaaacgtggcttcgttatctgtaagctgcgggcgagttgttgttccgcctgaagcaaaactgcgtctatgcgcgcttcggcgctgcctgtcagacgcagtattagcgttatcccgacggccagcagcagaggcgcaacgaacatcagcaaccagaaacgcagaaaagcggtccggcgttgctgtcgccagggcaaaaaattaattggcgggttcatcagtacgccttcccaagcgccagccccagcgcgatggcaaagtctccacctggcggcggtagcggcggctgacgaacagaaacggcctcccagggatcaaatccgccttcgccacatatcgcgacgctttcgggatcaacggataacgctgccgccagctccttcgcgctagtcatccccaccgccagtttgcgcccccagctatagcgcgtcgcccacagccactgttcgttatcacgccaggccagacattgctgatgagaaggtaaaaaaggcaggaatcgctgtaatgcactggcatccggggtgatcgcgctcacatgaacacgcaacctttctgccagagtaagcagcgttgccagctctttgctttgcgcggcagtcacgttataggcgggactgagactgtcttcgctgtaatcgaagcgcagggagtccggatccatatccagctcgcgggccatcgtcccactcagccaggccgtttgctcccgctcaccaagggacatgctcgggcgcggaaaactccgctgtaatgtgcgactggcgggaaacgccaacataatgtgatgacgctgcggcagttcgcgactccacggtaacaacgttttagccagctgctgcgcatcaacaatccgcccatctttgataatgtcgttctccagcggcaaccgccaccagcgttgcaaaaagcattcttttgcgccccgcacgatcgcaaccgctaccgcttcttgctgttgtaaatgcaaaccaatttgccagatcttaaatgccattgtgatgatctccttatcacccgtcactctgacgggtatatcaatgcgtctggcttgcctttatactaccgcgcgtttgtttataaactgcccaaatgaaactaaatgggaaatttccagtgaagttcgtaaagtattttttgatccttgcagtctgttgcattctgctgggagcaggcagcatttatggcctataccgctacatcgagccacaactgccggatgtggcgacattaaaagatgttcgcctgcaaattccgatgcagatttacagcgccgatggcgagctgattgctcaatacggtgagaaacgtcgtattccggttacgttggatcaaatcccaccggagatggtgaaagcctttatcgcgacagaagacagccgcttctacgagcatcacggcgttgacccggtggggatcttccgtgcagcaagcgtggcgctgttctccggtcacgcgagtcaaggggcaagtaccattacccagcagctggcgagaaacttcttcctcagtccagaacgcacgctgatgcgtaagattaaggaagtcttcctcgcgattcgcattgaacagctgctgacgaaagacgagatcctcgagctttatctgaacaagatttaccttggttaccgcgcctatggtgtcggtgctgcggcacaagtctatttcggaaaaacggtcgaccaactgacgctgaacgaaatggcggtgatagccgggctgccgaaagcgccttccaccttcaacccgctctacagcatggatcgtgccgtcgcgcggcgtaacgtcgtgctgagccggatgctggatgaagggtatatcacccaacaacagttcgatcagacacgcactgaggcgattaacgctaactatcacgcgccggagattgctttctctgcgccgtacctgagcgaaatggtgcgccaggagatgtataaccgttatggcgaaagtgcctatgaagacggttatcgcatttacaccaccatcacccgcaaagtgcagcaggccgcgcagcaggcggtacgtaataacgtgctggactacgacatgcgccacggctatcgcggcccggcaaatgtgctgtggaaagtgggcgagagcgcgtgggataacaacaagattaccgatacgctgaaggcgctgccaacctatggtccgctgctgcctgccgcagtcaccagcgccaatcctcagcaagcgacggcgatgctggcggacgggagcaccgtcgcattgagtatggaaggcgttcgctgggcgcgtccttaccgtagcgatactcagcaaggaccgacgccgcgtaaagtgaccgatgttctgcaaacgggtcagcaaatctgggttcgtcaggttggcgatgcatggtggctggcacaagtgccggaagtgaacagcgcgctggtgagcatcaatccgcaaaacggtgccgttatggcgctggtcggtggctttgatttcaatcagagcaagtttaaccgcgccacccaggcactgcgtcaggtgggttccaacatcaaaccgttcctctacaccgcggcgatggataaaggtctgacgctggcaagtatgttgaacgatgtgccaatttctcgctgggatgcaagtgccggttctgactggcagccgaagaacagtccaccgcagtatgctggtccaattcgcttacgtcaggggctgggtcagagcaaaaacgtggtgatggtacgcgcaatgcgggcgatgggcgtcgactacgctgcagaatatctgcaacgcttcggcttcccggcacaaaacattgtccacaccgaaagcctggcgctgggtagtgcgtccttcaccccaatgcaggtggcgcgcggctacgcggtcatggcgaacggcggcttcctggtggacccgtggtttatcagcaaaattgaaaacgatcagggcggcgtgattttcgaagcgaaaccgaaagtagcctgcccggaatgcgatattccggtgatttacggtgatacgcagaaaagcaacgtgctggaaaataacgatgttgaagatgtcgctatctcccgcgagcagcagaatgtttctgtaccaatgccgcagctggagcaggcaaatcaggcgttagtggcgaagactggcgcgcaggagtacgcaccgcacgtcatcaacactccgctggcattcctgattaagagtgctttgaacaccaatatctttggtgagccaggctggcagggtactggctggcgtgcaggtcgtgatttgcagcgtcgcgatatcggcgggaaaaccgggaccactaacagtagcaaagatgcgtggttcagcggttacggtccgggcgttgtgaccagcgtctggattggctttgatgatcaccgtcgtaatctcggtcatacaacggcttccggagcgattaaagatcagatcagtggttacgaaggcggtgccaagagtgcccagcctgcatgggacgcttatatgaaagccgttcttgaaggtgtgccggagcagccgctgacgccgccaccgggtattgtgacggtgaatatcgatcgcagcaccgggcagttagctaatggtggcaacagccgcgaagagtatttcatcgaaggtacgcagccgacacaacaggcagtgcacgaggtgggaacgaccattatcgataatggcgaggcacaggaattgttctgattaaaaaggcgcttcggcgccttttcagtttgctgacaaagtgcacttgtttatgccggatacggcgtgaacgcgttatccggctaacaaaatcgtgaaaactcaataaattgcagaaaccccataagcctgataaacattgtgcatcaggcaaacttcacgcatttacactcgcccctgccctttcaaccattcgcgcacgaggaacagcgcactgacattgcgcgcttcattgaagtcagggtcttccagccaatccatcatatgcgccagcggccagcgcacctgtggtagcggctctggctcatcgccttccagactttccgggtagagatcttgcgctaccacgatattcattttgctggaaaagtaagacggtgccatgctgagcttcttcaaaaaagtcagatcgttcgctccaaatccaacctcttcttttagctcgcggttagcggcttcgtagacgctttcacccggatcaattaatcctttgctaaaacctaattcgtaggattcagttcccactgcgtattcgcggatcaggatcaggtgatcgtccacaatcggcacaatcatcactgcttcccggttggttggacgcattcgttcataaacacgccgcacgccattgctgaactccagatccacgctctcgacggtaaacagtcgggaacgggctacagtttcaacattcagaatggtgggtttttgtaaacttttgctcatcgtgggatctatgctgtgaaatcagcggttattgtgcgatatcggacacgctttcggcaatgtgaattgcatgttatttacatttatgtaacttaataaataatcgtcctcaaatcaaattaaaagtcaataggttgaaataactccaggaatttgctgatattccgccttcagagggtttgctatgatcagcggttactgtgatgtgcttaatgatgctcaagttaaactccacgcttgccgatagccaaccgcagaatcatgtattgtgtccggtgcgactgaccacgcctgacagactaagtaagatggggaaagcatgagcaccattgtgatttttttagctgctttgctggcctgcagtctacttgcgggatggctgataaaagtgcgatccagacggcgtcagctgccctggaccaacgccttcgcggatgcgcaaacgcgtaaactcacacctgaagaacgtagcgccgttgaaaattatcttgagagcctgacgcaggtattacaggtgcctggcccaacgggagccagcgcggcaccgatctctctggcgctgaatgccgaaagcaacaacgtcatgatgctgacacacgctatcacgcgttacggcatctctaccgacgatccgaataaatggcgttactacctcgatagcgtagaagtccacctgccccctttctgggaacagtacatcaacgatgagaataccgttgaactgattcataccgatagcctgccgctggttattagtctcaacggtcatacgctgcaggagtacatgcaggaaactcgcagctatgccttgcaacctgttccgagtacgcaggcgagcattcgcggggaagagagtgagcaaatcgagctactcaatattcgcaaagaaacgcatgaagaatatgcgctgagtcgtccgcgcgggctgcgtgaagcgttgctgatcgtcgcctccttcctgatgttctttttctgcctgattaccccggatgtatttgttccgtggctggcaggcggcgcgttactgctgctgggcgcaggtctgtgggggctattcgcgcccccggcaaaatcctccctgcgggaaattcattgtctgcgcggtacaccccgtcgttggggattgtttggcgaaaacgatcaggaacagatcaacaatattagtctcggtattatcgacctggtctatcccgcacactggcagccatacattgctcaggatctcggtcaacaaaccgatatcgatatctatctcgaccgccatgtagtgcgtcagggacgatatcttagcctgcatgatgaagtaaaaaactttccgttacagcactggctgcgcagtacgattatcgctgcgggcagcctgctggtgctgtttatgctgttattctggatcccgctggatatgccgctgaaattcactctcagttggatgaaaggcgcgcagaccattgaagccaccagcgtaaaacaactggctgacgctggcgtgcgggtaggcgatacattgcgtattagcggtacgggaatgtgtaatattcgaacttccggaacctggagcgcgaaaaccaatagtccttttttaccgtttgactgcagccagatcatctggaacgacgcccgcagtttgccattaccagaatctgaactggtcaacaaagcgacggcattgactgaagcagttaatcgccagctgcaccctaaaccggaagatgaatctcgcgtcagtgccagtttacgtagtgcaattcaaaaatccggcatggtattgcttgatgattttggcgacattgtactgaagacagcggatttatgttctgccaaagatgactgtgtgcgactgaaaaatgcgctggtcaatctcggcaacagtaaagactgggacgcgctggtaaaacgcgccaacgccgggaagctcgatggcgtgaatgtgttattacgcccggtgagtgcggaaagcctggataacctggtggcaacctccaccgcgccgtttatcacgcatgaaacggcgcgagcggcacaaagtctaaacagtccggcccccggcggattcctgattgtcagcgacgaaggcagcgattttgttgatcagccctggcctagcgcaagtctttacgactacccgccgcaagaacagtggaacgctttccagaaactggcacaaatgctgatgcatacgccgtttaacgccgagggtatcgtcacaaaaatcttcactgacgccaatggtacgcagcatattggccttcatccgatcccggatcgttccggcctgtggcgctatctcagcaccacattgctgctactgacgatgctgggtagcgccatttacaatggcgtacaggcctggcgtcgttaccagcgtcatcgcactcgcatgatggagattcaggcctattatgaaagctgcctgaacccgcaactgatcacccctagtgaaagccttatcgaataacacgtttgcgcggcaggttatgctaccctgtcgcgcaaattgcttcactctggagatttccctcatgcatatcaacattgcctggcaggacgtagataccgttctgctggatatggacggcacgttgctcgacctcgccttcgataactatttctggcaaaagctggtgcctgaaacatggggcgcgaaaaacggggttacgccacaggaagcgatggaatatatgcgccagcaatatcacgacgtacagcatacgctaaactggtactgtcttgattactggagtgagcaactgggtctggatatctgtgcgatgaccaccgagatgggaccgcgtgccgtactgcgtgaagataccattccgtttcttgaggcactgaaagccagcggtaagcagcgaattttgctcaccaatgcgcatccgcacaacctggcggtaaaacttgagcataccggtctggacgcacaccttgatttattactttccacccacacatttggttatccgaaagaggatcagcggttatggcatgcggtggccgaagctacgggtctgaaagctgaaagaacgctgtttattgatgacagcgaagcgattctcgatgctgccgcgcaatttggtattcgttactgcctcggcgtgactaatcctgattccgggattgccgagaaacagtatcaacgccatccgagtctgaatgactaccgccgcctgatccccagcctaatgtgaaggagacgccatgaaagagaaacctgctgttgaggttcgactggataaatggctatgggctgcccgtttttataaaacccgcgcgctggcccgtgaaatgattgaaggcggtaaggtgcattacaacgggcagcgcagcaagccgagcaaaatcgtcgagctgaatgccacgctcactctgcgccagggaaatgacgaacgcacggtgattgtaaaggcgattactgaacagcgtcgccccgccagcgaggcagccttgctgtatgaagagactgcggaaagtgtagagaaacgcgaaaaaatggcgctggcacgtaaacttaatgccttaaccatgccgcacccggaccgacgcccggacaaaaaagagcgccgcgacctgttacgatttaaacacggcgacagtgaataactgtcacctgcaagagagatgattatgccgcaacatgaccaattacatcgctatctgtttgaaaactttgccgtgcgcggcgaactggtaaccgttagcgaaaccctgcaacagatccttgagaaccacgattatccgcagcccgttaaaaacgtgctggcagaactgctggttgcgaccagcctgttaaccgctacgctgaagtttgatggtgatatcaccgtacagctgcagggcgacggtccgatgaatctggcggttattaacggtaacaataaccagcagatgcgcggtgtggcgcgcgtgcagggcgaaattccagaaaatgccgacctgaaaacgctggtcggcaatggttacgtggtgatcaccattaccccgagcgaaggcgaacgctatcagggcgtagttggtctggaaggtgataccctggcggcctgcctggaagattactttatgcgttctgaacagctgccgacgcgcctgtttattcgcaccggcgacgtagacggcaaaccggctgcaggcggtatgttgttgcaggtaatgcctgcgcaaaatgcccagcaggacgactttgaccacctggcgacgctaaccgaaaccatcaaaaccgaagaactgctgaccttaccggcaaacgaagtgttgtggcgtttgtatcacgaagaagaggtgacggtttacgatccgcaggatgtggagttcaaatgcacctgcagccgtgaacgttgcgccgatgcgctgaaaacgctgcctgatgaagaagttgatagcatcctggcggaagatggcgaaattgacatgcattgtgattactgcggtaaccactatctgttcaatgcgatggatattgctgaaatccgcaacaacgcgtctccggcagatccgcaagttcattaatgagtatgtccggcagagagggctctgccggattttacgactaatacacctgatgcgctttgtcactcattcagattcacattcagcctttcaccatccactacaagatcgcgccacgctttaggcttcgtccccagttttccatccttcgcagctgtgagtaatttttctttcgttatttcgttcggaagtaaactcatatcaagcgcgtcccattcttttctgtcactgtcaaagccatagacaatgactctgtcatcattaaaagcaaacaggatccgctccgcctgaccatcactattcagatcttgctcgaccaggacgcaggcgtctttttcaatacaggtcatcacgttatagcgatcctggattaaggcgctccagaatgtcgcatcaggtttaacagaaccaggggcaattaacacattatcggctaatactttttcgcttacctgttgctgaagatgttgctctccatctaacgccatcagcagatcccgcgcgcgtttcgggtctttcataaacccggcatcgcttttcaggctctcaagcgcagcacgtccatagcgaccgctctgctcgagcatgtagatagttacctggtcactcgtgtttttgccgctctgataacgcgccatatggctgttcacgctaatgcgcatactgtccagcaccgggctattaagaagcaccagtatcaccaacaccaataagctaaccgcaaggttcactttgccctgaagaacaacgggattttgccctttacgccagacgatgctgacaaaataccccaggctccacaccagtaacaccagcaccgccagcacgccctgcaagcggtcgacagtccagccgtactgagcgacccgcagccataacgcccaggcggcgacgaacacatacagcggagcaaccagcaaagcggttttaatcaggcaacgcaacggccctgtccagggaagactcgctttttgcggatcgcggacaatagccattaagatcaattgcaaaaaggccagcgtcaacagcaacccggcggcggagatgtggcgagaaatcgcgctcaggcccgtaaacggcagggtgatgataaacatcagggttagcaaacttactaacggcagcaaccccgtggcgattaacgtgaacaacttttgaatagagtcgattaaacgactctgtgttcgcgcgaggatcaccgccagcgcggtaaccagacctaacgtgagataaataaaccagtcggttgcaaaaaagagcgtattgaaaaacgtgatgccaacaagtttaaacaactcactccacagtaaaagcaccagccacgtcaagccattggcgagaaaaatcaccagtaatataagtacgttatgccatacactctggtaaaaatagcgatagcggctactgtcattgcggatgcgaaggctttgttgtatccacggtagcaacaacattgccatcaacagcagatagcaaccaaaatcccaaagcgccttttcagctctccaggggttcatgccatcagtttgccacttcagccagccgctcatccccagcgtggcaataaacactagcgccagccatccccaaaggcgcttctgtttaaaagagatcacggagaagagtaaaacggaactaaacgcgacggtcgcaggcacgccataaacaatccaactgtgattttttccggaaagccaggcgatcagcaggtagcaaaccagaccctgaagtaatccggtagcaatcatcccccagcgtgttgcgggactaagttcaacgttatccatgttggttatccagaatcaaaaggtgggttaattatcgcatccgggcagtagtattttgcttttttcagaaaataatcaaaaaaagttagcgtggtgaatcgatactttaccggttgaatttgcatcaatttcattcaggaatgcgattccactcacaatattcccgccatataaaccaagatttaaccttttgagaacattttccacacctaaaatgctatttctgcgataatagcaaccgtttcgtgacaggaatcacggagttttttgtcaaatatgaatttctccagatacgtaaatctatgagccttgtcgcggttaacacccccaaaaagactttactattcaggcaatacatattggctaaggagcagtgaaatgcgcgttaacaatggtttgaccccgcaagaactcgaggcttatggtatcagtgacgtacatgatatcgtttacaacccaagctacgacctgctgtatcaggaagagctcgatccgagcctgacaggttatgagcgcggggtgttaactaatctgggtgccgttgccgtcgataccgggatcttcaccggtcgtagtccaaaagataagtatatcgtccgtgacgataccactcgcgatactttctggtgggcagacaaaggcaaaggtaagaacgacaacaaacctctctctccggaaacctggcagcatctgaaaggcctggtgaccaggcagctttccggcaaacgtctgttcgttgtcgacgctttctgtggtgcgaacccggatactcgtctttccgtccgtttcatcaccgaagtggcctggcaggcgcattttgtcaaaaacatgtttattcgcccgagcgatgaagaactggcaggtttcaaaccagactttatcgttatgaacggcgcgaagtgcactaacccgcagtggaaagaacagggtctcaactccgaaaacttcgtggcgtttaacctgaccgagcgcatgcagctgattggcggcacctggtacggcggcgaaatgaagaaagggatgttcagcatgatgaactacctgctgccgctgaaaggtatcgcttctatgcactgctccgccaacgttggtgagaaaggcgatgttgcggtgttcttcggcctttccggcaccggtaaaaccaccctttccaccgacccgaaacgtcgcctgattggcgatgacgaacacggctgggacgatgacggcgtgtttaacttcgaaggcggctgctacgcaaaaactatcaagctgagcaaagaagcggaacctgaaatctacaacgctatccgtcgtgatgcgttgctggaaaacgtcaccgtgcgtgaagatggcactatcgactttgatgatggtagtaaaaccgagaacacccgcgtttcttatccgatctatcacatcgataacattgttaagccggtttccaaagcgggccacgcgactaaggttatcttcctgactgctgatgctttcggcgtgttgccgccggtttctcgcctgactgccgatcaaacccagtatcacttcctctctggcttcaccgccaaactggccggtactgagcgtggcatcaccgaaccgacgccaaccttctccgcttgcttcggcgcggcattcctgagcctgcacccgactcagtacgcagaagtgctggtgaaacgtatgcaggcggcgggcgcgcaggcttatctggttaacactggctggaacggcactggcaaacgtatcagcattaaagatacccgcgccattatcgacgccatcctcaacggtagcctggataatgcagaaaccttcactctgccgatgtttaacctggcgatcccaaccgaactgccgggcgtagacacgaagattctcgatccgcgtaacacctacgcttctccggaacagtggcaggaaaaagccgaaaccctggcgaaactgtttatcgacaacttcgataaatacaccgacacccctgcgggtgccgcgctggtagcggctggtccgaaactgtaatgatttgaagctggagaatatctatccagtatcttatagaaagcaaaacgggaggcaccttcgcctcccgtttatttacccttcttttgtcgtgccctgcgcccgcgttaccggcactggcagccaggcgcgaatggaaagcccgccccgctcgctggtgccaagctccagcatcccgttatggttatccacgatacgctgcacaattgccagccctaatcccgtgccgctaatggtgcgcgcactgtcgccgcggacaaacggctggaacaggtgcttacgttgttccggcgcaattcccggaccgtcatcttccacctggaaccaggcgcgattcggctccgttccgctgctgactttgatccagccattgccataacgggcggcgttgaccaccatattcgccaccgcgcgtttgatgctcagcgggtgcattttcacttcaatgctgccggggtaaagcgcggtttcaatttcccgctcatagccactttcggcagcaatcacctcaccgagtactgcattaagatccgccatttccatcggcatctcctgcccggtgcgcaggtagtcgataaactgctcaatgatggcgttgcactcttcgatatctttattgatgctttctgccagatagccatcctgctcgctcatcatctcagtcgccaggcgaatacgcgtcagcggcgtgcgcaagtcgtgacttacccccgccatcagcagcgtgcggtcatccgccagttgcttaacaccagccgccatatggttaaaggcacgggtaacggaacgcacctcgctagcgccatactcacgcagcggcggcggaataatccctttaccaacctgcaaggctgcgtgttcgagatcgaccaacggtcggttctggatacgaataaacagccacgccccgcctatcgccaatagcataatcgccagcgtatagcggaacagcggagagaaatcgccctgatgaatttcggtcagcggcacgcgtacccagatattggggctcagccaggttttcagccagacgacagggctacttttgttgacctcaacgcgcacttccgtcgggccgcccagttgctgcgccatctgatggcttaagaattcatagtgttgcgcccaacgcagacctgcctcttcggcagcctcgttggagtagagagagatccccagctcacggtagatctcccgacggaaagcgggaggcacaaccaactgcgtgccgtcctccagttgcagtttgtcggtcatcaacatacgcacttcgtacgcgaggactttattaaactgctggaggctcggcaaaatcgcgaagttcagcaccaccagataagtcgtcaccaggctggcgaacagcaaggtgacgatgagcaataacgtacgggcaaaactacttcgtgggctgaagcgcaatcgcctcatgctttagagccgtccggtacaaagacgtagcccagaccccagacggtctgaatgtaacgcggatgcgctggatcttcttccaccatgcggcgcagacggctaatctgcacgtcgatggagcgttccattgcggaatattcacgaccacgggcaaggttcatcagcttatcgcgggagagcggctcacgcggatggctgaccagtgccttcagtaccgcaaactcaccgctggtgagcggcatcggctcgtcttcgcggaacatttcgcgcgtaccgaggttaagtttgaacttaccgaaagcaattaccgcctcttcctgactcggtgcgcctggcagttcgttcgcctgacgacgcagcaccgcacggatacgggccagcagttcacgcgggttaaacggttttggaatgtagtcgtcagcgccaatctccaggcctacgatacggtccacttcttcccctttcgccgtcaccataatgatcggcatcgggttgctctgactacgaagacgtcggcaaatgctcaagccatcttcaccaggtaacattaaatccagtaccataagatggaaagattcacgagtcagcaggcgatccatctgttctgcattagcgacgcttcgaacctggaagccttgttcggtgagataacgttccagcagcgcacgcaggcgcatgtcgtcatcgaccaccagaatcttgtagttctcttgcattgtttgtactcccaaaggttcgcaacaatttgtaagcgtgtattcttaaaaaagctcacgttcgtcaccagctaaatctggtatgaatttcagcctaaattgttacaaagcatattaaacagcagcttaagtatacaatttattcggcgaaacattattgattctgttgatatgatcacgttatacccaatgtgcgcattatcaaacagacaaagggaatcaacgagatgaaaacgcccctggttacccgggaagggtatgaaaaactcaaacaagagcttaattatctctggcgtgaagaacgcccggaggtcacaaaaaaggtgacctgggccgcaagtctgggcgaccgcagcgaaaatgctgactatcagtataataaaaagcgtctgcgtgaaatcgaccgtcgcgtgcgctatctcactaaatgcctggaaaatctcaaaatcgtcgattactcccctcagcaggaaggcaaagtcttttttggcgcgtgggtggagattgaaaacgacgatggcgtgactcaccgtttccgtattgtcggctacgatgaaatttttggccgtaaagattacatctctatcgattccccgatggcccgcgcattgctgaaaaaagaagtcggcgatctggcggtggtgaatacccctgccggggaagcgagctggtatgttaatgctatcgagtacgtgaaaccgtaaggaagagtcttaacctcctgccgatggctggcatttttgccagccagtccgtataactatcccctgatttttgatccgaaaagatgaactcaaaccatgatgaatgatagcttctgccgcattattgcgggtgaaattcaggcgcgcccggaacaggttgacgctgccgttcgcctgcttgacgaagggaataccgtgccgtttatcgcacgttatcgtaaggaaatcaccggcggtctggatgacacgcagctgcgtaatctggaaacgcgtctgagctatctgcgcgagctggaagagagacgtcaggcgatcctcaagtccatttccgagcaaggcaaactcaccgatgatctggcgaaggccatcaacgccaccctaagcaaaaccgaactcgaagacctctacctgccctacaaacctaaacgccgcacccgcgggcaaatcgccattgaagcagggcttgagccgttggctgacctgctgtggagcgatccgagtcacacgccagaagtcgccgctgcacaatatgtttatgccgataaaggcgtggcagataccaaagccgcgctggatggcgcgcgctatatcctgatggaacggtttgccgaagatgccgcgctgctggcgaaagtgcgtgattatctgtggaagaacgcgcatttggtttctacggtggtgagcggtaaagaagaggaaggggcgaaattccgcgactatttcgatcatcacgaaccgttgtccacggtgccttctcaccgcgcgctggcgatgttccgtgggcgtaacgaaggcgtacttcagcttagcctgaatgccgatccacagttcgatgagccgcccaaagagagctattgcgagcaaatcatcatggatcaccttggcctgcgcctgaacaatgccccggcggatagctggcgcaaaggcgtggtgagctggacgtggcgcatcaaggtgctgatgcatctggaaaccgaactgatgggcaccgtgcgcgaacgtgcggaagatgaagcaatcaacgtctttgcccgtaacctgcacgatctgctgatggcggcccctgccggactgcgtgcaacgatgggcctcgatccgggtctgcgtactggggtaaaagtggcggtggtcgatgccactggcaaactggtggcgaccgacaccatttacccgcacaccggacaggccgcaaaagcagcgatgaccgttgctgcgctgtgtgaaaaacataacgttgaactggtagcgatcggtaacggtacagcttcccgcgaaactgagcgtttctatctcgatgtgcagaagcagttcccgaaagtgaccgcgcagaaagtaatcgtcagcgaagcaggcgcgagcgtttacagcgcttccgagctggctgcacaggagttcccggatctcgacgttagcctgcgtggcgcggtgtctatcgcccgccgtttgcaggatccgctggcggagctggtgaaaatcgatccgaaatctatcggcgtaggtcagtatcagcatgacgtcagccagacgcaactggcccgcaaactggacgcagtagtagaagactgcgtaaacgccgttggcgtcgatctcaacactgcttctgttccgctgttaacccgcgtggcgggcctgacgcgcatgatggcgcaaaacatcgttgcctggcgcgatgagaacggtcagttccagaaccgtcagcaactgttaaaagtgagccgtctggggccgaaagccttcgagcagtgcgcgggcttcttgcgcattaaccacggtgataacccgctggacgcgtctaccgttcacccggaagcctatccggtggtggaacgcattctggcagcaacacagcaggcactgaaagatctgatgggtaacagcagcgaactgcgtaacctgaaagcgtctgactttactgatgagaaattcggtgtgccgacggtaaccgacatcatcaaagagctggaaaaaccgggtcgcgatccgcgtccggaatttaaaaccgctcagtttgccgatggcgtcgagacaatgaacgacctgcaaccgggtatgatcctcgaaggcgcagtgaccaacgtcaccaactttggcgcgtttgtcgatattggcgtgcatcaggacggcctggttcacatctctagtttgagcaacaagtttgtggaagatccgcataccgtggtgaaagcgggcgacattgtgaaggtgaaagtgctggaagtggatcttcagcgtaaacgtatcgccctgactatgcgcctggatgagcagcctggcgaaaccaacgctcgtcgcggcggcggtaatgaacgcccgcaaaacaaccgcccggcagccaaaccacgcggtcgtgaagcgcagcctgccggtaatagcgcgatgatggatgcgctggcggcggcaatgggcaaaaaacgttaaacgcccgtactggcctacggttcgaatttgcacgaaatcgtagggcagataaggcgttcacgccgcatctggcaacgaacgccttgcctgacataaaagtgccggagaatatctccggcatttttattccacagccaaactcataatatattccggcaatatttatcatttcattaacaactgaaaccttaattaaacattagccagtccgggtaattcactattcgaattatattttcgctgcgatataaccttgagccacatcaacattgagtcagattattattcaaaccaacattcgcacacattttaagtattgctgatagaaaccattctcattatcattgtgttgttgattatttaatctctcctttgttggcaaatcatctggtctcatgtcgctgtcaaacgccccatgaggtagttatccagttaatgagaaacaagtaggcacctatgcaatacactccagatactgcgtggaaaatcactggcttttcccgtgaaatcagcccggcatatcgccaaaaactgctttctcttggcatgttacctggctcctcttttaatgtggtgcgcgtcgctccactcggcgaccccattcatatcgaaacccgtcgtgtgagcctggtattacgcaaaaaagatctggccttattagaagtggaagcggtttcctgttaatacggtgataacaacaatgaaaaaattaaccattggcttaattggtaatccaaattctggcaagacaacgttatttaaccagctcactggcagtcgtcagcgtgtaggtaactgggctggcgttaccgtcgaacgtaaagaagggcaattctccaccaccgatcatcaggtcacgctggtggacctgcccggcacctattctctgaccaccatcagtagccagaccagcctcgatgagcaaatcgcctgtcactacattttgagtggcgacgccgacctgctgattaacgtggtggatgcgtctaaccttgagcgtaacctgtacctgacgctacaactgctggaactcggcattccctgcattgtggcactgaacatgctcgacattgccgagaagcaaaatattcgtattgaaattgatgctctgagcgcgcgtctgggctgtccggtgatcccgctggttagtacccgtggtcgcggtattgaagcgctcaagctggcgattgatcgctataaagctaacgagaatgtggaactggtgcattacgcacagccgctgctcaacgaagcagatagtctggcaaaagtgatgccttccgacatcccgctgaaacaacgtcgctggctgggcctgcaaatgctggaaggcgatatctacagccgcgcctacgccggtgaagcgagccagcatctggatgccgccctcgcccgtctgcgtaatgagatggacgatccggcgctgcacattgccgatgcgcgttaccagtgcattgctgccatctgtgatgtggtaagcaacaccctgacggcagaacccagccgtttcaccactgcggtagataaaatcgtgctcaaccgtttcctcggtctgccgattttcctctttgtgatgtacctgatgttcctgctggctatcaacatcggcggggcgttacagccgctgtttgacgtcggctccgtggcgctatttgtgcatggtattcaatggattggctacacgctccacttcccggactggctgactatcttcctcgcccagggcctgggtggcggcattaacaccgtgctgccactggtgccgcagattggcatgatgtacctgttcctctccttccttgaggactccgggtatatggcgcgtgcggcgtttgtgatggaccgtctgatgcaggcgctgggcttgccggggaaatcctttgtgccgctgatcgtcggtttcggttgtaacgtaccgagcgtaatgggtgcacgtacgcttgatgcaccgcgtgaacgtctgatgaccatcatgatggcaccgtttatgtcctgcggcgcgcgtctggctatcttcgcagtattcgcggctgccttcttcgggcagaacggtgcgctggcggtcttcagcctgtatatgctgggtattgtgatggcggtgctgactggcctgatgctcaagtacaccatcatgcgcggtgaagcgacgccgtttgtcatggagttgccggtctatcatgtaccacacgttaaaagcctgattatccagacctggcagcgtctgaaaggcttcgttctgcgtgctggtaaagtgatcatcatcgtcagcattttcctgagcgctttcaacagcttcagcctgagcgggaaaatcgtcgataacatcaacgacagcgcgctggcgtccgtcagccgggtgatcaccccggtcttcaagccaattggcgtgcatgaagataactggcaggcaacggttggcctgtttacaggtgccatggcgaaagaagtggtagtgggtacgctcaacaccctctacaccgcagaaaatattcaggacgaagagttcaatccggcagaatttaacctcggtgaagagctgttcagtgcgatagatgaaacctggcagagcctgaaagacaccttcagccttagcgtactgatgaaccccattgaagccagcaaaggcgacggcgaaatgggtaccggggcgatgggcgtgatggatcagaaattcggtagcgcagcagcagcttacagctacctgattttcgtcctgctgtatgtaccatgtatcagcgtgatgggggctatcgcccgtgaaagtagccgtggctggatgggcttctccatcctgtgggggctgaatatcgcttacagtctggcaacattgttctatcaggtcgccagctacagtcagcatccaacttacagcctggtgtgcattctggcggttatcctgtttaacatcgtggttatcggtctgctgcgccgcgcgcgtagccgggtggatatcgaactgctggcaacccgcaagagcgtaagcagttgctgcgcagccagcaccaccggtgattgccattaatggctagtcttattcaggtgcgcgatttgctggcgttacggggccgtatggaagcggcccagataagccagacattgaacactccacagccaatgattaacgccatgctgcaacaactggaaagtatgggcaaagccgtgcggattcaggaagaacctgacggctgcctctctggcagttgtaaaagctgcccggaaggaaaagcctgtctgcgcgagtggtgggcgctgcgttaaccttactccatcgcctgttttggaaagcccggtatgcgtctgcatccgggcttttttgcgtgcggctttccataaaaatgcaactcttgcagcacggcgtaagttcctttgaaagcatctcgcagggatgaaaactcgctaatacacaggtgtggagtggcgcgtagagtcgcggcattcaaacaacaggtgaaggaacgccatgagcaaaaagcagagttccaccccacacgatgcgctgttcaaactctttttacgccaaccggacacggctcgtgattttcttgcgtttcatttaccggcacccattcacgcgctttgtgatatgaaaaccctcaagctggagagcagcagctttattgatgacgatctgcgtgaaagctattccgatgtgctgtggagcgtgaaaacggaacaaggaccaggatacatctattgtctgattgaacatcaaagcaccagtaacaaactgatcgcatttcgcatgatgcgttacgctattgccgcaatgcaaaatcaccttgatgctggatacaaaacgttgccgatggtggtgccattgttgttttaccacggtattgaaagcccctatccctatagcctgtgttggctggattgtttcgccgatcccaaactggcaaggcagctttatgcctccgcatttccgctgattgatgtcaccgtcatgcctgatgatgaaatcatgcagcaccgacgtatggcgctgctggagttaattcaaaaacatattcgtcaacgcgacctgatggggctggtagagcaaatggcctgcttattaagtagtggatacgctaatgacagacaaatcaaagggctgtttaattacatactgcaaactggcgacgctgtacgttttaacgattttatcgacggcgttgccgaacgtagtccgaaacacaaggagagtttaatgactattgcggaaagattgcggcaggagggggaacaatccaaagccctgcatatagccaaaataatgcttgaatccggagttcctcttgcagacatcatgcgctttaccgggctgagtgaagaagagttggctgcggcgagtcagtaaagttctgtctcgccatttcaaaagccacttacaccctctgcttcaacgccaccagcaggtgacaaaactcggccggatggctaataaatggcgcatgggccgctttggcgaagatataactttcgctgtgaggccaaagtttatccagcatcggcaccactttgcgcggcaccagaccgtcgagatagccatacaatcgcaaaaacggcatggacacgttttgcagcggctgacggagatcgaccgttttcaggatttccagcccgccattaagcacgtcaacctccggcatcggtaacgccagaacggttttcttcaacgcccgcgcatcctggcgcgccgtttcagtccccatggtttgtaacgccaggaaccgctccactgtacgctgaaaatcatcactgagttgctgctgaaatcccgccagcacgtccggttttatccccggccactcgtcacgagcactaaaacaaggactgctcgccacggtgaccagcgcctgaacacgctcgggatgggttaacgcaatctggcttgccaccagcccgcccagactccagcctaaccaaatggctttatcaggtgcctgttgcagcacggcttcggccatatcagcaagactcagcgcaccaaatccccggctacgcccgaagccgggcaggtcaacaaggtgcagcgtaaaatggctgctaagttcctcgtcaatgcaacgccacacttcggcattcagtccccatccgtgcagcagcacaagatgaacattcccctgacctttggtctgccaccagatgttattcatccgctattgttctcttttgacttacaaggatgaacatatgctaacagtaccgggattatgctggctatgccgaatgccactggcgttaggtcattgggggatttgtagcgtctgtagtcgcgccacccgcacagataaaacgttatgcccacaatgtggattacccgccacacactcccatcttccctgcggtcgctgcctgcaaaaaccgccgccctggcaaagactggtcacggttgccgactatgcgccgccgttaagtccgcttatccaccagcttaaattttcccggcgcagtgaaatcgccagcgccctgagtcgtctgttactattggaagtcttacacgctcgtcgcaccaccgggttgcaattgccggatcgcatcgtcagcgttccgttatggcagcggcgtcactggcgtcggggatttaatcagagcgatttgctgtgtcagccgttaagtcgctggttgcactgccaatgggatagcgaagccgtcacacgtacacgggccactgcgacccagcattttctcagtgcccggctgcgcaagcgcaacctgaaaaatgcctttcgtcttgaattgcccgtgcaaggtcgccatatggtgattgtggatgatgtcgttaccaccggaagtaccgtcgcagagattgcgcagttgcttttacgcaatggtgcggcggctgtccaggtctggtgcctttgtcgaaccttgtaaagcctcgatgatgggcgtattataaccaactaaaatagtcaactattaggccattactatgatccgtatttccgatgctgcacaagcgcactttgccaaactgctggcaaatcaggaagaagggacacaaatccgcgtatttgtgattaaccctggcacgcctaacgctgaatgtggcgtttcttattgtccgccggacgctgtggaagccaccgacacagccctgaaatttgacctgctgaccgcgtatgttgatgagttaagcgcaccatacctggaagatgcagagatcgattttgttaccgaccagttgggttcccagttaacgctgaaagccccgaacgccaaaatgcgtaaagtggcagacgatgcaccgctgatggagcgcgtggagtatatgctgcagagccagatcaacccacagcttgctggtcacggtggtcgcgttagcctgatggaaatcaccgaagacggttacgccattctgcaatttggcggtggctgtaacggttgttccatggtcgatgtgacgctgaaagaagggatcgagaagcagctgctgaacgaattcccggagctgaaaggtgtgcgcgatctcaccgaacaccagcgcggcgaacactcctactactaagttatcccctcttttgtagattgcccgatgcgacgctaaagcgtcatttcgggcctacgttgaacatgtgccagacgttggcgcagcattgctttgtcaaatcctcggttcgtttccccgcgataatatgaccaacctctcataatttaaatttaccccgctctggtgattctcaaacgccagatgttacccgtatcattcacatgggtaccaaacatactcctgacatctgactacaataattagttttagtgggtatcagtcgtggtgccgcaatatctctgttcccgattgggataattagagtttgtcgtcagaaaattgacgttacccataacaaatgaaaggccaggtaaatcatgccattagtcattgttgctatcggtgtaatcttgttgttgctcctgatgatccgcttcaaaatgaacggcttcatcgctctcgtcctcgtggcgcttgctgttggattaatgcaaggaatgccgctggataaagttattggctccatcaaagccggtgtcggcgggacgctcggtagccttgccctgatcatgggttttggcgcaatgctgggcaaaatgctggcagactgcggtggcgcacaacgtatcgccaccacgctgattgccaaatttggtaaaaaacacatccagtgggcggtggtactgaccggttttaccgttggttttgccctgttctatgaagtgggctttgtgctgatgctgccgctggtgtttaccatcgcggcttctgcgaatattccactgctgtatgttggtgtaccaatggcggctgcactgtctgtgacccacggcttcctgccaccgcatccgggtccgactgcgattgccaccattttcaatgccgatatgggtaaaaccctgctgtacggtactattctggcaatcccgaccgtgattctcgccggtccggtttacgctcgcgtgttgaaaggtatcgataagccaattccggaaggtctctacagcgcgaaaaccttcagcgaagaagagatgccgagctttggcgtcagcgtctggacctctctggtgccggtagtactgatggcgatgcgtgcgattgccgaaatgatcctgccgaaaggtcacgctttcctgccggtagcggagttcctcggtgacccggtaatggcaacgctgattgccgtgctgattgcgatgttcacctttggtctaaaccgtggtcgtagtatggatcagattaacgacacgctggtttcttccatcaaaatcattgcgatgatgctgttgatcatcggtggtggcggtgcgttcaagcaggtgctggtagacagcggcgtggacaaatacattgcttccatgatgcacgaaaccaacatttctccgctgctgatggcctggagcattgctgccgtactgcgtatcgcgctgggttccgcaaccgttgcggcaatcactgcgggtggtatcgcggcaccgctgattgcaacgacgggtgttagcccggagctgatggttattgcggttggttccggtagtgtgattttctctcatgtgaacgatccgggcttctggctgttcaaagagtactttaacctgactatcggcgagaccatcaaatcctggagcatgctggaaaccattatcagcgtgtgcggtctggtaggctgtctgctgctgaatatggtgatttgataacactgactgccggatgcggcgtgaccgccttatccggcctacgattcgggatgaattagtaggccggataagacgcgtcaagcatcgcatccggcatcaaccgcactttacttcttcttcgctgcagctctgcgccgtctgtccaaatccttcagcaacttgttcacgccatcatcggcaaacatgctctcaagcgttgcggaaagcttgcgtcgccagtttttatactggtaactggtgccaggaatattcaccggttcggccatatccagccagtcttccggctgtagtcctaacagagcactgttactgtcggcaatgtagcgctgcaaaccacggttcagcgtcggcgtcatgctcatcaagcttgccttatgcccggcacgtttcggcagacaaccatatttatgcagtgcatccagcagcccttgcttcgccagttcgcgatcctgatacagaccgcgcagtaccacttcatccggatacagccccagggttttgcccagcgttagatccccgcactcccagtaaccgcgcagcgttggcaggtcatgtgtcgccgcaaccgccatgctctgctccggatacgctttcggtgcacggaacgtcttctcgtggtcgttttcgaaatagagcactttgtaagagtacacaccgctgctgcgcagcttaccgacaatctctaccggtacggtaccgagatcttcaccaatcaccatacagcgatgacgtttactttcgagtgccagaatgctgagcagatcatccaccggatagtgaacatacgcgccctgatctgccgtctcgccatacggtatccaccacaaacgcagcatgctcatcacatggtcaattcgtaatgcgccgcagttttgcatattggcacgcaacagctcgataaacggttcataggcacgcgcggtgatgatatgcgggtccattggcggtaatccccagttctgccccaacgggccgaggatatccggcggcgcgccaacgcttgctttcaggcaatatagttcacggtcacaccaggtttccgccccaccttccgctacgccaaccgccagatcacgatacaagccaatcggcatttcatagccctggcttatctcccagcaggcggcaaactggctgtaagccagccactgcaaccagagataaaaatcgacgtcatcacgatgttcttcgcagaactgacgcacttctggactatccacgttctgatacatctctggccatgcaggccagccccagcgcatttcgtcctctttcacttgctgggcatgtagcgcatcaaaggctgcctgccagaacaggctgtcgccctgctctgcaacaaactggcgaaacgcggccatctgctcatcatcacgttgcgcgaaacctttccacgccattcgtaatgctgtcatttttagggcggtaaccgtggagtaatcgacccagtcggcatcgcgcgcctgttgcagcgtctgttgcgtggtcggcaactgccaccaggcctgagcctcttcgctaagatggaaatcttcaacggcgttaacgtcgatataaatcacattcagccaacggcgagaagacgggctgtatgggctggcgctctccggatttgccggatagagcgcatgaatcgggttcaggccaatgaagctcccgccacgttttgccacatccaccagcatcgctttgagatcgccaaaatccccaataccccagtttttttcgcttcgcagcgtataaagctgaacgcaggcaccccacagcttttgtttattcagcaacgcctgcggttcgtaacagcgtttcggggcgacaatcacccggcaatgcgcgcgctggtcgtcctgggtgagtgtcagcgtgtgataaccttccggcagcttcgtcggtagattgaacgctttgccccccgttacatggcctttgtactgcgttccttcttcggtggtcagcagccagctatattcgccgctgccctccaccaccatcggcatttttttgccgctggtataaaccatgacattcgggactggcgttaccgccactttcgtggcggtacgttgatgcatcgcgtcaagcaaacgccgtttggtttcggcgctaatgctctgcggtttaccgtgggcattgatgtaattggggctaatccccgccgccagcgcggcattatccagacgtttgctttccatcgagcttccttagcgttttgcctgccagatacgagcctgataatcgcgaatagagcgatcgctgctaaacataccgcagcgggcggtattgaggatcgccgcgcgagtccaggcctcctggtcgcggtacagcacatccacctgcttttgtgcctctacataggctgcgaaatccgccatcaccagatacggatcgccgccctgtttgccgatactgtgcagcatctggtcgaaggcatgcttatcgccgtcgctgtatttaccgctttccagctctttcaatactgcgtccagcaccttatctttcttccgccatttcaccgggtcgtagcctttggccagaattgccttcacttgttccacggtatgaccaaaaataaagatattttcttcaccgactttctcggcgatttcaacgttcgccccatccagcgtaccgacagtaagcgcaccattgagcgccagtttcatattgccggtaccggaagcttctttacctgcagtgctaatttgttcggagatatccgccgccgggatcagtttttccgccgcgctaacgcaataatccggcaggaacaccaccttcaacttatcgccaaccagcggatcgttgttgatcacgtcagccactttgttgatcgcaaagataatattcttcgccaggtagtagcccggtgccgctttcgcgccgaagaggaagacgcgcggtacgcgatcagcctgcgggttttcacgaatttctttgtacaacgccagaatatgcagcagattcaggtgctggcgtttgtactcatgcaaacgtttgatctgaatatcgaaaatcgcctgtggattgatctcaataccggtacgaactttcacaaactccgccagacggactttattcgcctgcttgatctcgcgatattgctgacggaatttcgcatcatcagcgaatttttccagattgatcagctgatcgagatcgttagcccactctttttgcagacttttatccaacagagccgccagtgccgggttgcactgtttgatccagcgacgtggggtaataccgttggtgacgttatggaatttgttcggccatagctggtgatattccgggaacagatctttcaccaccagatcgctgtgcagcgccgcaacaccgttcaccgcgaaaccgccaaccacacacaggttcgccatatgcacttgtttgtcgtgcaccaccgccagtttggcccacactttttcatcgcccggccaggttttctctaccagcgttttaaagcgagtattaatttcgttaataatctgcatgtggcgcggcagtaagcctttcaccagtttcacatcccagcgttccagcgcttctggcatcagggtatggttggtgtaagcgaaagttttgctggtaatggcccaggcgtcatcccagctcatctggtgctcatcgatcagcacgcgcagcagttctggaatcgcgatagttgggtgggtatcgttcagctgaataacttcgtaatccgccagttcgtgcagtttacgccccgccagatgatggcgacgcaaaatatccgctacgctacaggcacactggaagtattgctgcatcaggcgcagctttttaccggcagtatggttgtcgtttggatagagaactttggtcagtttttccgcattgatgccctgctgttcggcacgcaagaaatcaccgtcgttaaatttagtcagatcaaacggatgcgcgtgcgtcgcctgccacagacgcagcggctgcgccacgccattacgatagccgacaacggggagatcccacgcttgaccggtaatggtaaactccggctcccagcgtccgtctttcgtcactttaccgccaatccctacctgcacatccagtgcttcgttgtggcggaaccacgggtagttactgcgatgccagtcatccggcgcttcaacctgtttgccatcgacaaaagactggcggaacaaaccatattgatagttcagaccgtaacccgtcgcagactgaccgacagttgccatactgtcgaggaagcacgccgccagacgtcccagaccaccgttacccagcgccgggtcgatctcttcttccagcaggtccgtcagattgatgtcataagccttcaagctatcctgtacatcctgataccagccgagattcaacaggttgttgcccgtcaggcgaccaatcaaaaactccatactgatgtagttaacatgtcgctgattcgccaccggcttggcgaatggctgagcacgcagcatttcggccagtgcttcactcactgctagccaccactggcgaggagtcatttcagccgcagaatttaagccataacgctgccactgacgactaagcgcttcctgaaattgcttatcgttaaaaataggttgactcataggagttccacttttcttagattttcaacacaacgttatcgctagtttgccaggctcgatgttgaccttcctcatcctgcgggggattaggcagggaggagttgcggggatgagcaaggaaatgtgatctcaaccacttaaagctagtgcaaaccacaggattagcatcaaatcaatgcaatacagcgcagaaaatctgtatctaagtgcaaaaaatggccgttgcgtattttcaaaaagcggaaggtaactctataaattaagtaaaggagtgaaacagtttcataagtaaaatatccagtgtgctccatctcattcttaatagatttattaagatcatctttttagatggcactttcatcaggaatgaagaagaaacccttgcttaaatgaatctgatgaacataagggaaaccagtattcacgctggatcagcgtcgttttaggtgagttgttaataaagatttggaattgtgacacagtgcaaattcagacacataaaaaaacgtcatcgcttgcattagaaaggtttctggccgaccttataaccattaattacgaagcgcaaaaaaaataatatttcctcattttccacagtgaagtgattaactatgctgattccgagtaaactaagtcgtccggttcgactcgaccataccgtggttcgtgagcgcctgctggctaaactttccggcgcgaacaacttccggctggcgctgatcacgagtcctgcgggctacggaaagaccaccctcatttcccagtgggcggcaggcaaaaacgatatcggctggtacagcctggatgaaggtgataaccagcaagagcgtttcgccagctatctcattgccgccgtgcagcaggcaaccaacggtcactgtgcgatatgtgagacgatggcgcaaaaacggcaatatgccagcctgacgagtctcttcgcccagcttttcattgagctggcggaatggcatagcccactttatctggtcatcgatgactatcatctgatcactaatccagtgatccacgagagtatgcgcttctttattcgccatcaaccagaaaatctcaccctggtggtgttgagtcgcaaccttccgcaactgggcattgccaatctgcgtgttcgtgatcaactgctggaaattggcagtcagcaactggcatttacccatcaggaagcgaagcagttttttgattgccgtctgagtagcccgattgaagccgcagaaagcagtcggatttgcgatgacgtttccggttgggcgacggcactacagctaatcgccctctccgcccggcagaatacccacagtgcccataagagcgcacgccgcctggcgggaatcaatgccagccatcttagcgattatctggtcgatgaggttttggataacgtcgatctcgcaacgcgccattttctgttgaaaagcgccattttgcgcagtatgaacgatgccctcatcacccgtgtgaccggcgaagaaaacgggcaaatgcgcctcgaagagattgagcgtcaggggctgtttttacagcggatggatgataccggcgagtggttctgctatcacccgctgtttggtaacttcctgcgccagcgctgccagtgggaactggcggcggagctgccggaaatccaccgtgccgccgcagaaagctggatggcccagggatttcccagcgaagcaattcatcatgcgctggcggcaggcgatgcgctgatgctgcgcgatattctgcttaatcacgcctggagtctgttcaaccatagcgaactgagcctgctggaagagagccttaaggccctgccgtgggacagcttgctggaaaatccgcagttggtgttattgcaggcgtggctgatgcaaagccaacatcgctacggcgaagttaacaccctgctagcccgtgctgaacatgaaatcaaggacatcagagaagacaccatgcacgcagaatttaacgctctgcgcgcccaggtggcgattaacgatggtaatccggatgaagcggaacggctggcaaaactggcactggaagagctgccgccgggctggttctatagccgcattgtggcaaccagcgtgctgggtgaagtgctgcactgcaaaggcgaattgacccgcagtctggcgctaatgcagcaaaccgaacagatggcacgccagcacgatgtctggcactacgctttgtggagtttaatccagcaaagtgaaattctgtttgcccaagggttcctgcaaaccgcgtgggaaacgcaggaaaaagcattccagctgatcaacgagcagcatctggaacagctgccaatgcatgagtttctggtgcgcattcgtgcgcagctgttatgggcctgggcgcggctggatgaagccgaagcgagcgcgcgtagcgggattgaagtcttgagctcttatcagccacagcaacagcttcagtgcctggcaatgttgattcaatgcagcctggcccgtggtgatttagataacgcccgtagccagctgaaccgtctggaaaacctgctggggaatggcaaatatcacagcgactggatctctaacgccaacaaagtccgggtgatttactggcaaatgaccggcgataaagccgccgctgccaactggttgcgtcatacggctaaaccagagtttgcgaacaaccacttcctgcaaggtcaatggcgcaacattgcccgtgcacaaatcttgctgggcgagtttgaaccggcagaaattgttctcgaagaactcaatgaaaatgcccggagtctgcggttgatgagcgatctcaaccgtaacctgttgctgcttaatcaactgtactggcaggccggacgtaaaagtgacgcccagcgcgtgttgctggacgcattaaaactggcgaatcgcaccggatttatcagccattttgtcatcgaaggcgaagcgatggcgcaacaactgcgtcagctgattcagcttaatacgctgccggaactggaacagcatcgcgcgcagcgtattctgcgagaaatcaatcaacatcatcggcataaattcgcccatttcgatgagaatttcgttgaacgtctgctaaatcatcctgaagtacctgaactgatccgcaccagcccgctgacgcaacgtgaatggcaggtactggggctgatctactctggttacagcaatgagcaaattgccggagaactggaagtcgcggcaaccaccatcaaaacgcatatccgcaatctgtatcagaaactcggcgtggcccatcgccaggatgcggtacaacacgcccagcaattgctgaagatgatggggtacggcgtgtaagtttagccggataacgcgccagatccggcttacatctctgcatcattcaatgctcacccgcgttacgccatctgtttctatcaaactaaaccgcaccggcaagaaacgctccaccaccgcgatattggtcagcagatggcaactgggatgggcgaccgtaaattcccccgcgcccgccagcgccatcggtagcaccagttggtcagcaagatattcccccaccgccgccgtgcttgccaggtagcgtttcacctctttcaccaactgtgccgcaaccacctcggcactgacgcgcttttcaccgacgacaaaaaagcgttcggtgatattttcactttcgacttcaaggctgacggtattacccggcccctggtcgcgcggcaggttatgaatattctgttcatgcagggaaaaactccccgccagtgtagcgatttcacgctcagcaacatggcgcggcacaccagctaatagaacttctccacgcatctgcacaatgttcccgcgctcgccaagttgcaaggtgttaaagcttgccacggggctgacttccgttgccaccacaccgcctccggcagggtaaaaaccgtggcgtaacagcgtggtttgctgatgaattcctattttcgccagcagcggctccagcacccggcggataaaatccgcaggcggcgcgctcgggttatcggtgccgccgctcacttcaacacggctaggtccatcggcaaaccacagcgcgggcagcaccgtttgcagcaccagcgtacaacttccggcgctaccgatagcaaagcggtaatcgccgccgcgcacggtgccgggccggaagagcagacgctggctccccagctccgcgccttccacggttgctccgcaaatttccgtcgccgcctttaccgcggtcagatgctggcgcaacagccccggtttcgcccgcccggcacgaatgctggtgatggtaaatggctggccggttatcatgctcaggctcagcgcgctgcgcaggatctgcccgccaccttcgccctgtgcgccatccagcgcaatcatccttttcatcatttatccttttacgcacaccacctgacgcagggtatagataacttccaccagatcgctttgtgccgccatcaccgcatcaatatctttatacgccatcgggatttcgtcgatcacttcggcatctttacggcattccacatgcgcggtggcacgaatttgatcttccacgctgaacagttttttcgctttagttcggctcattacccgcccggcaccgtggctgcagctacagaagctctcttcatttcccagcccacggacgataaagctttttgctcccatgctaccgggaataattccatattgaccagcacgcgcagacaccgcgcctttacgcgtcacgtagatctcttcaccaaagtgctgttctttttgcacatagttgtggtgacagttgatctcttccatcgccagcgtttgtggctgtctgaccgttttctgcgtaatgctctgcaatgccgttaccacgttttccatcatcgcatcgcggttaaggctggcaaaaagctgcgcccaggccacggctttcaggtaatcatcaaagtattccgtaccttccataaagtacgccagatcacggctcggcaacgtctcaagcgtttcctgcatctctttttgtgccagatcgataaagtaagtcccgatggcgttaccaattccgcgactaccggagtgcagcataatccacacctggtcgctctcatcaaggcagatttcaataaagtggttaccggttcccagcgttcccaggtgtttatagttattggtattcaggaaacggggatatttttgcgttaaccactgataaccggcttcaagctcagcccatttagcatcgacgttaacaggtggattttcccaggcacctttatcacgtttacaacggccagtggtacgcccgtgcggcacggccgtttcaatcgcctgacgcagctctgccaggttttcaggcaggtcttccgccgttaacgcggtacgcagcgcgttcattccacagccaatatccacgcccaccgccgccggaataatcgcccctttggtcgggatcacgctaccaatggtggaacctttacccaggtgtacatcaggcattaccgcaatatgtttgaaaataaacggcatcttcgccgtattaataagttgctgacgcgcatcggcctctaccggcacgcctttggtccacatttttaccggggcattttcagtggtcagtaattcgtaattcattttgtttttctcttttcgttgtttgctgtcctgataattgcaaccgtcgtgccagaaaattaaataagcagcttaattttttaattcattgttttaaaaaagattatatctttacgtccgtaaccggagatttcccgcaaagccaatttaccgataatgaaatatcgtcttttataaggatatctaagatgcgtaaaacagtggcttttggctttgtcggtaccgtactggattatgccgggcgcggcagtcagcgctggagtaaatggcgtccgacactctgtttatgccagcaagaaagcttggtcatcgatcgactggaattgttgcacgacgcccgcagccgcagcctatttgaaacgcttaaacgcgatatcgccagcgttagcccagaaacagaagtggtgagcgttgagattgaactgcataacccgtgggatttcgaagaggtctacgcctgcctgcatgatttcgcccgtggttacgagtttcagccagaaaaagaagactatttaattcacatcaccaccggtacccacgtcgcgcagatttgctggtttctgctggcagaagcgcgttacctgcccgcccggctgatacaatctagtcctccgcgcaaaaaagaacagccgcgcggcccaggtgaagtaacgattatcgatctcgatttaagccgttataacgccatcgccagccgctttgccgaggaacgccagcaaacgcttgattttcttaagtccggcattgccacgcgtaacccccacttcaaccgcatgattgagcagatcgaaaaagtggcgatcaaatcccgcgcgccgattctgcttaacggtccaaccggcgcgggcaagagttttctggcgcgacgcatcttagagttaaaacaggcgcggcatcagtttagcggcgcgtttgtggaagtgaactgcgccaccctgcgcggcgataccgccatgagcacgctgtttggtcatgtaaaaggcgcgtttaccggggcgcgggaatctcgtgaaggtttattacgcagcgccaacggcggaatgttgtttcttgatgagattggcgaactgggcgcagacgaacaggcaatgctgctgaaagccattgaagagaaaaccttttacccgtttggcagcgatcgccaggtgagcagtgattttcagcttatcgccggaacggtgcgcgatttgcgccagctggttgccgaaggcaaatttcgcgaagatctgtacgcgcggatcaatctctggaccttcaccctgccgggtctacgccagcgccaggaagatattgaaccgaacctggattatgaagtggagcgccacgccagtctcactggcgacagcgtgcgttttaacaccgaagcgcggcgcgcctggttggcttttgcgacctctccccaggcaacatggcgcggtaactttcgcgaactttctgccagcgtcacgcggatggccacctttgccactagcggacgcatcactctggacgtggttgaagatgagataaaccgtctgcgctataactggcaggagagccgcccctccgcgcttacggcgttgctgggcgcagaggcagaaaacatcgatctcttcgaccgtatgcaactggaacacgttatcgctatctgccgccaggcaaagagcctttccgcagccggacgccagctttttgacgttagccgccagggcaaagccagcgtcaatgacgcggatcggctacgcaaatacctggcgcgttttggtctgacgtgggaagccgtgcaggatcagcacagctccagttgaatatggtggtccgtcagcacctgcatcacgcttactggcggcggggcgtcggtgtagacggcatctaccatgctgatgctgcccatattgaccatcgcgttacggccaaatttcgagtgatcgacaaccagcataacgtggcgcgagttctcaataatggcgcgtttggtgcgaacttcgtggtaatcgaactccagcagcgagccgtcgctatcgatgccgcttatccccagaatgccgaaatcaaggcggaactgggagataaaatcgagcgtcgcttcgccaatgatcccgccatcgcggctgcgtaattcgccaccggcgagaatgatgcgaaaatcttcttttaccatcaacgtgttagcaacgttgagattgttggtgacaatgcgcaaattgctgtgattgagcagtgcgtgcgctaccgcttccggcgtggtgccgatatcgataaacagcgtcgagccattggggatttgctccgccactttgcgggcgatgcgctctttttcttcggtctgggtggccttgcgatcgtgccacggcgtgttaaccgaactggaaggcagcgccgcaccgccatgatggccaggatcaggttttgctccgccagctcattgaggtcgcggcgaatagtctgcgggctgacggagaaatgctctaccagctcttcggtactgacataaccctgctgtttaaccagttcgataataccgttgtgacgttgtgtttgtttcatttataaatccctggaattattttcgttttcgcgcattgaggctatcaacaaaagccatcgctaaacccacggctaacccggcgatgtgtgctccgttcgccatgctcatcccaaacaaatcaaaccatccggcgacaatccagatcagcgcaaagataattaacccacgttgcaggtaaatgccactttgcggatcgcgttcgccacgtagccagacgtagcccatcagcgcatacaccacgccagaaagcccgccaaaccacggcccgctgaatttttgctgcacatagccgcttaacagggcgctgataagcgtaatgacaattagcttaccgctaccgaggcgtttttccaccgcaccgccgagataccaccaccagagcaggttaaagaggatatgcatcaggctgaagtgcattaacgcgtgggtgaagtaacgccagaactcaaatttcagtgttggatcgaatggccaggccagccataacatcacttcctgatcgccgagaatttgcatggcaataaacaccaccacgcaggcgatcatcatcacccaggttaccggacctgcgcgttcacgcaaggcggcaaagaaaggataacggcgataatgcaggccactgccggtatggcctgcctgccagctcgccgccagataacgcggatctgccgggttttcgagaaaacgcgccagctccgcccgtacgcgctcggcctgggactcatccgccagccagacatcgctttggttatgttgttgaatcgtgaggataacaccctgcgtcgccatgtaatcaacaaacgcctgcgccacgcgggggttagcaaaagaggtaatcatcaacatcgttgctgtcgcttattccacacaaaaggggacagtataaagcgttacgcgccgtacgccacctctgcgggaaactgacgttgccaggcttcaaagccgccgtcaatgctatagaccacatcgtagccctgttgcagcagatactgcgccgcgcctttgctgctattgccgtgataacacatcaccatcaccggagtgtcaaagtcgttatcacgcataaaagcgcccagcgtgtcgttggttaaatggaaagcctgcaccgcatgtcccattgcgaaactctgtggatcgcgaatatcgaccagcaccgcctctttttcctgcaacttctggtgcgcgtcggcaacgttaatacattcgaactgatccatgcgtctctctttctttacaaacaagtgggcaaatttaccgcacagtttacgtcgaagcggcagataaacgccataatgttatacatatcactctaaaatgttttttcaatgttacctaaagcgcgattctttgctaatatgttcgataacgaacatttatgagctttaacgaaagtgaatgagggcagcatggaaaccaaagatctgattgtgatagggggcggcatcaatggtgctggtatcgcggcagacgccgctggacgcggtttatccgtgctgatgctggaggcgcaggatctcgcttgcgcgacctcttccgccagtagtaaactcattcacggtggcctgcgctaccttgagcactatgaattccgcctggtcagcgaggcgctggctgaacgtgaagtgctgctgaaaatggccccgcatatcgccttcccgatgcgttttcgcctgccacatcgtccgcatctgcgcccggcgtggatgattcgcattggtctgtttatgtacgatcatctgggtaaacgcaccagcttgccgggaagtactggtttgcgttttggcgcaaatagtgtgttaaaaccggaaattaagcgcggattcgaatattctgactgttgggtagacgacgcccgtctggtactcgccaacgcccagatggtggtgcgtaaaggcggcgaagtgcttactcggactcgcgccacctctgctcgccgcgaaaacggcctgtggattgtggaagcggaagatatcgataccggcaaaaaatatagctggcaagcgcgcggcttggttaacgccaccggcccgtgggtgaaacagttcttcgacgacgggatgcatctgcctagcccttatggcattcgcctgatcaaaggcagccatattgtggtgccgcgcgtgcatacccagaagcaagcctacattctgcaaaacgaagataaacgtattgtgttcgtgatcccgtggatggacgagttttccatcatcggcactaccgatgtcgagtacaaaggcgatccgaaagcggtgaagattgaagagagtgaaatcaattacctgctgaatgtgtataacacgcactttaaaaagcagttaagccgtgacgatatcgtctggacctactccggtgtgcgtccgctgtgtgatgatgagtccgacagcccgcaggctattacccgtgattacacccttgatattcatgatgaaaatggcaaagcaccgctgctgagcgtattcggcggtaagctgaccacctaccgaaaactggcggaacatgcgctggaaaaactaacgccgtattatcagggtattggcccggcatggacgaaagagagtgtgctaccgggtggcgccattgaaggcgaccgcgacgattatgccgctcgcctgcgccgccgctatccgttcctgactgaaagcctggcgcgtcattacgctcgcacttacggcagcaacagcgagctgctgctcggcaatgcgggaacggtaagcgatctcggggaagatttcggtcatgagttctacgaagcggagctgaaatacctggtggatcacgaatgggtccgccgcgccgacgacgccctgtggcgtcgcacaaaacaaggcatgtggctaaatgcggatcaacaatctcgtgtgagtcagtggctggtggagtatacgcagcagaggttaagcctggcgagctaaattaacgtaaggtgatcaggtcagatttcaatctggcctgagactgatgacaaacacaaaactgcctgatgcgctacgcttatcaggcctacgtggtttatgcaatatattgaatttgcatggtcttgtaggccagataagacgttcacgtcgcatccggcatgaacaaagcgcactttgtcaaaaatctaacctactttttaattcagggaattaccgcaaagcccacgccatcatacccaacgtaacaaaactcaggcacgttccccactcgcccgctgaaaaatagcattaatgcgcccagcgccagcataaaaattttgagcagaaggtaaattgttggcgtgataaggatattacaaacttcaataataccggcaagtccgacacccagcatggcaataaccaccgccaaaaattgcgccagtatggggatgccgaaaaaagtcattaccaggctggtcaaaatccattttctgttttgcattattctttccattctttttgaatggtgaaattatactccccgagtccccttgccccttctggacacttttccgaaatgatggcggaaaaaaacgggaccctttggccccgttctatttattggtgaacttacaatctcaccggatcgatatgccagatatgatcggcgtactctttgatagtacggtcagaagagaagtagcccatattggcaatgttcagcatcgcttttgcggtccactcttcctgaagctcgtagagttcatcgactttatcctgacaatcgacatagctgcgataatccgccagtacctggtagtgatcgccgaagttgatcaggctatcaaccagatcgcgatagcgacccggatcttccggactgaatacaccgctgccgatttgcgtcagcacctgatgcagctcctcatctttctcgtagtattcacgcggtttgtagccctgacgacgcagttcttccacttcttccgctgtgttaccaaaaataaagatattgtcagcaccgacatgatccagcatctcgacattcgcaccgtccaacgtaccgatagtcagcgcaccgttaagcgcaaacttcatgttactggtgccggaagcttccgtccctgccaggctaatctgttcagacagatctgccgccggaatgatcaactgcgccaggctaacgctgtagttcgggatgaacacgactttcagcttatcgccaatctgcggatcgttgttgatcactttcgctacgtcattgatcaaatgaataatgtgcttcgccatgtaataggcgctagccgccttaccgccaaaaatattcacgcgcggtacccacttcgcatccgggtcggccttgatgcggttatagcgggtaatcacatgcaacacattcatcaattgacgtttgtattcgtgaatacgtttgatttgtacatcgaacaacgcctttggattcaccaccacattcagctgctgggcgatatactctgccagacgctttttgttctccagcttcgcctgatgcacagcgtgattaaccattgggaaatcacagtgttgttgcagctcattaagcaggctaaggtcggtgcgccagttacggcccaggtgttcgtccagcacggcactaaggcttgggttcgctaccgccagccagcgacgcggcgtcacaccgttggtgacgttggtgaaacgacccgggaagattttcgcaaagtcggcaaacaagctttgcaccatcagattagagtgcagttcgcttacaccgttaactttgtggctcacaacaaccgccagccaggccatacgcacacgacgaccgttggattcatcaatgatgctcgcccgtcccagcagatcggtatcgttcggatactgttcctgcaaggttttcaggaaatagtcgttgatttcaaagatgatctgcaggtgacgcggcagaattttacccagcatatcaaccggccaggtttccagcgcctcgctcatcagcgtgtggttagtgtaggagaagacctgacaacacacctcaaacgcgtcgtcccagctaaattggtgctcatcgatcagcagacgcatcatctcaggaatgctcagtaccggatgggtatcattgagatgaatcgcgattttatccgccaggttatcgtaggttttatgcaactgataatggcggcttaaaatgtcctgaatggtgctggaaaccaggaagtattcctgacgcaggcgcagctcacgcccggagtaggtggagtcatccggatacagtacgcgagatacgttctcggagtggtttttatcttccactgccgcgaagtagtcaccctggttgaatttaccgaggttaatttcgctactggcttgcgcactccacaaacgcagcgtgttggtcgcgtcggtgtcgtaaccagggattatctgatcgtaagcgactcccagaatctcttcggtttcaatccagcgcgtttttttaccttcctgctgaatgcgaccgccaaaacggactttatagcgcgtgttgtggcgtttgaattcccacgggttaccgtattccagccagtagtctgggctctctttctggctaccgttaacgatgttctgcttgaacataccgtagtcatagcggatgccgtaaccgcgccccggcaaccctaacgtcgccagagaatcaaggaagcaagccgccagacgtcccaggccaccgttaccgaggcctgggtcattttcttcatcaatcagctcttcgagatttaaccccatcgcttccagtgcgccctgtacatcttcgtaaattcctaggctcaacatggcgttggagagcgtacggccaatcaaaaactccatgctcaggtagtaaacctgacgagtttcttggctcaactgggcacggttactacgtaaccagcgctccacgagacgatcgcgcacagcaaataacgttgcgttcagccattcatgtttattggcgacgaccgggtcctttccaatcgtaaacatcagcttgtaagcgatagagtgcttaagagcttctacgctaagcgtggggctactatatgtaaacggagcattcatataggcgtttcctgaaaattatttcaagcgatagtaaagctcacggtagctcttcgccgcgacctgccagctaaaatccattgccatagcctgacgttgcacaaaccgccacagactaggacgggaccacagtacaaaagcacgtcgaatagcccgtaacaggctccaggcattactatcttcaaagacaaacccactggcgacgccatctgcaaggttctcaagagaacagtcagaaaccgtatcagcaagcccaccggtgcgccgcactaacggcagcgtaccgtacttcaatccataaagttgcgttaagccgcacggttcaaaacggctgggcaccagaatgacgtccgcgccgcccataatgcgatggctaaatgcttcgtgatagccaatctgaacgcccacctgaccggggtattccgctgccgccgcaaggaaaccttcctgcagcaccggatcgcccgcgccgagtagcgccagctgcccgccctgctccagaagacccggtaaggcttccagcaccaggtcgagacctttctggctggtcagacggctcaccactgcaaaaagcggcactttatcgtcaaccttaagccccattgcgatttgtaactggcgcttattttccgctttatcttccaacgtatcgcgggtgtaacggctggccaacagtaagtccgtctctggactccagattttctcgtccacgccgttcagtacgccggaaagacgcccttcacggtgacgctgttgcaacagaccttccataccgtaggcaaactgcggttcggtgatctcgcgagcgtaggttggactgaccgccgtaatgtgatcggcatagtacagaccggccttcaggaaagagatttgtccgttgaattccagcccatgaatattaaagaaactccatggcaattggatgtcattcatgtgatgtgcataaaacatgccttgataggccaggttgtgcacagtaaacacgctcttcgccggacgcccgcgcgccgccagatacgcaggcgcaaggcctgcatgccagtcgtgcgcatgcaccacatcaggacgccagaatgggtcaagcccgctggccatttctgccccaacccaccccagcagcgcaaaacgcaatacgttgtcggtataggcaaataagttggtatcgtgatacgggcttcccggacgatcatagagatgcggcgcgtcaatcaggtaaatgccaaccccgttgtaatgaccgaacaacagcgtgatatgtccggcgaaggtatcacgacgggatactacctgcgcatcggtcacgccacggcgaatatcgggaaatgcaggcaacagtacgcgagcgtcaacgccgtctgcgatttgtgctgcgggtaatgccccaataacatcagccagaccgccggttttaagcagcgggaacatctcactacatacatgtaaaacctgcattatcgctcctgtttatgccctaacttccgtagcatttcgcgcgttaccagcacgatgccttcttcactacgatagaaacgacgtgcatcttcctctgcgttttcaccaatcaccatgccttccggaataacacaagcacgatcgatgacgcagcggcgcagacggcagctgcgacctacccatacttccggtaacaatacggcggaatcaatgttgcagaaactattcacgcgaacgcggctgaacagaacggactgcaccaccacgctaccggagatcacacaaccgccggaaaccagactgttaagggtcatcccgtggctaccggagcgatcctgcacgaatttcgctggcggtaaactttcattgtaggtgcgaattggccaattgcgatcgtacatatccagttccggcaccacagaggccagatcgaggttcgctttccagtaagcttccagcgtacccacatcgcgccagtacggctcggcatccgggtcggattgtacgcaagagagcgggaacgggtgcgcataggccagaccggcttcggtgatcttgggaatcaaatctttgccaaagtcgtggctggagttctcatcgcgatcgtcttcttccagcagttcatacagatagtcggcgtcaaagacgtagatacccatactcgccagagatttgctcggatcgttcggcatactcggcgggttagcaggtttttcaacgaattcgataattttatcgttctcatcaaccgccataacgccaaatgcggaggcttcttcaatcggtactggcatacaagcaacggtgcaacgtgcgcctttttcgacgtgatcgataagcatacggctgtagtcttgcttgtagatatggtcgcccgccaggatcaccacgtattccgctttataacggcggataatgtcgaggttttgggtgaccgcatctgcggtgccgcgataccagttttcccctttcattctctgctgtgctggcagcagatcgacaaactcgttcatttcttcattgaagaaactccagccgcgctgaatgtgctgcaccagagtgtgggactggtactgggtgatcacgcccatacgacggatcccggagttgatgcagttagacagcgcaaagtcgataatgcggaacttaccgccgaagtgtacggccggttttgctcgcttattggttaaatccttcaggcgggtaccacgtcctcccgccagtatcagggcaacagatttcaatggcagctggcgcgccaacattaagtgatcgttcttctctaaactaaccatgactaactccttttttatcatctctggaacacacacaatccgtgtgcaggtccctgccagacagccgtaatcactgggttatcctctccagcgaatgggggaatggcgtgccactccccagcaggtaaaacaatctctgttacctcaagcgtggcgttaattgcgatcaaaaagcgatcgctgagcagaatttgcagctgtttcggcccgttttgccactcatccgtgcttaaaggttgagcatatcgatttagccaacggacattgccgtcgccttcttcccaccagcgattctccaccaaagcgggaatgcgcttgcgcagatggattaacgcggcggtaaatgcggttaaaccactgcttgcctggctccagtccaaccaggttaattggttatcctgacagtaggcattgttattgccatgctggctgtgaccatgttcgtcaccggccagtaacatcggcgtaccctgggagagcaacaacgttgttaacagggcgtgaatgctgtcgcgccgccgttcaaccaggtcaagagaaccgcctaacccttctttaccatgattgttactgtaattgttgttggtcccgtcgcgattttcttctccgtttgcttcattgtgtttatggttgaagcaaacgcagtcgcgaagcgtaaaaccgtcatgcgcggtgacgagattaatcgcggcactcggcagacgaccattacgtttaaaaacatcgctggaggcagcaaaacgcccggcaaacgcccccagaggcaaatcataatgtagccagaaacgacgggcagcatcgcggaaatgatcgttccactcggcaaacagcggcgggaaatttcccacctgataaccaccaggagcgatatcccacggttcagcaattaacttcacctggctgagcaccgggcagttctggatagcggtaaacaacggcgcatcctgacggaactctggcgtacggcccatgactgccgccagatcaaagcggaaaccatcgacgtggcaggtttctacccaataacgcaggcaggcgctggcataatccaccaccgccggatgactcaaattgagcgtgttgccgcaaccggtccagttgtgataatcgccgtcttctcttatccaataatagctacggttatcgatcccacgcaggctgaataacgggccgtcgaggtccagttccgcactatggttgagcacgatatcaagaatgacttcgatacccgctttatgcagtgctttgattgcatcgcgaaactcatccagcgccgtttctgggctgcaggcatacgccggatgcagcgcaaacatcgccaccgggttgtaaccccagtagttacttagccccatgcgttgcagacgtggttcactggcaaactgcgccactggcagcagttccagcgcggtaatgcccaattgtttcaaatagttgatcatcaccggatgcccgagggctttataagtgccacggatctcgaccgggatctccgggtgcaagtacgttaatcctttgacatgggcttcataaatgatggtgctgccccacggcgtgcgcggcggggcatcatcttcccagtcatagtgatcaaccaccactacgcatttcggcgcaatggcggcgttgtcgcgatagtcaggttcattatgaccggcgtgcagcagcgggttatctttaaactccccgtcaatttgccgcgcgcaaggatcaatcaacaacttcgccgggttaaagcgatgcccctcggcgggttgccaggggccatgaacgcgataaccataacgcaaacccgggcgcgcatccggcagataaccgtgccaaatgtcgccactgtgccctggcaagtcatagcgatgttcctggccattggcgtcaaagacacacagttctacccgctcggcatgagcggagaaaagtgtgaagttgacgccctgaccgtcgtaatgcgcgccgaggggagcgggtttgccaatggcgagttgtgtcattctgcctcccgaaccagccagatagtggccagcggtggtagcgtcaggcttagactatgctgacgaccgtggctggcaatctcatcgctgtgtaccgtgccgccattgcctgcattactgccgtgatagtgcatggaatcggtattgaggatttcacgccatttgcccggctggtttatgccgaagcgataatcatgacgcggtaccggcgtaaagttactggcaacgatgatttcgttaccctctttatcgcgacgcacaaagatcagcacgctgcgttctttgtcatccaccaccagccattcaaagccgtacgggtcaaaatccagttcatgcattgctttatggtggcggtaggtgaggttcagatcgcgcaccagacgctggacaccgtggtgccagttatcgccgccttccaacagatgccagtcgaggctggcgtcatggttccactcgcggccctgggcaaattcgttacccatgaacagtagtttcttgcccgggaatgcccacatccagccatagtaggcgcgcaggttcgcgaatttctgccatgcgtcgcccggcatgcggtcgagaatgctttttttaccgtggaccacttcatcatggctcaacggcaggacgaagttttcagtgtagttgtagagaatcccgaaggtcagtttatcgtgatgatactgacgataaaccgggtcgagcttcatgtagtccagggtgtcatgcatccagccgaggttccacttgtaccagaagcccagaccgcccatatcctgcggacgagaaacgccagggaaatcggtagactcctcagccattgtcaccgcaccggaaacctgctcaccaagaatacggttggtattacgcaagaattcaatcgcttcaagattctcgcgcccgccaaattcgttcgggatccactccccctctttacggctgtagtcgcgataaatcatactcgccaccgcatcgacgcgcagcgcatcaataccaaaacgttcaatccagtaaagcgcgttaccgacgaggaagttactgacttcacggcgaccatagttgtagatcagcgtgttccagtcctgatgatagccttcacgcggatcgctgtgttcatacaagttcgtgccatcaaattcggcaagcgcaaagtcatcagtcgggaagtggcctggcacccagtcgagaatcacgttcagaccagctgcgtgtgcggcatcaatgaaataacggaagtcgtcgcgagtaccaaaacggcgggttggcgcatacaggccggttggctgataaccccaactgccatcgaagggatgctcgttaatgggcagtagttcgaggtgggtaaagcccatccatttagcataaggcaccagttgatcggccagctcgcggtagctcaaccagaaattgttgtcggtgtggcgacgccaggaacccaggtgaacttcataaatagagattggcgcatcaaactgattcgcttttttgcgctcttcagtctgtacaaccttttccggcagcccgcaaataagagacgcggtttccgggcgcatttgcgcttcaaaggcataagggtcggacttcagacgcaagttgccattggcatcaatcatctcgtatttatagagctgaccgttatgcgccccagggataaacagttcccagatgccgctctctttacgcaggcgcatcgggtgacggcgaccgtcccagtagttgaattgcccaaccacgctgacccgacgggcgtttggagcccagacagagaaacgcgtacctgtgacgccatccatagtatctgcatgcgcgcctaaggtttcatacgggcgcaggtgagtaccttcagataatagccaggcatccatttcctggattagcggaccaaaacggtaaggatcatcaatcaggttttgctgaccatgccagacaacagccaactgatagcggaaaaaattcttacgtcgcggaatgacgccgctaaagaatccccgactgtcgagacactccagttttgcgagtttgcgcccggttttcggttcaatcacccacacatcggtagcgtcgggtaaaagggcacggacttccagtcccgcggtggttttatgcattcccagtacggaaaaaggatccgcaaaatggcctgcaattagcgcgttaatcacgtctctatcgatacgatcggacatgcttgtcttcctgttttattgtgtcaccccatccaattggatttttgacttctggttgtgacatttttttgacctgaacggcgcagcactctgtgcatcctctctgcgtcgtcctcacttcaggtaaggctgtgaatactcatgtattcagccacccttaaagaatagccaatgctctatttaactcccggtaaatcatgaaacatctgcgcttactcctgtattacgcactaacaggggcggcatcgcgccccagatttaatgaataaagattacgccagttgacgaagcatccgacgcagcggctccgcggccccccacagcagctggtcgcccacggtaaaggcactcaggaactctggtcccatattcagcttacgcaggcggcctaccggcgtggtcagcgtgccggtaacggcagctggggttagctcacgcatagtgatttcccgatcgttcggaacgactttcgcccacggattgtgcgcagccagcagttcttccacggtcggaatagacacatcttttttcaatttaatagtgaatgcctggctgtggcagcgcaatgccccgacacgcacacataaaccatctaccggaattacggaagatgtgttgaggatcttgttggtttccgcctgccctttccactcttcgcggctctgaccgttatcgagctgtttgtcgatccacggaatcaggctacccgccagcggcacgccaaagttatccaccggcagctcaccgctacgggttaaggttgtgactttgcgttcgatatcgagaatagcagaggacggggtcgcgagttcatctgccacatggccatacagatggcccatctgggttaataactcacgcatatgtcgcgcaccaccgccggaagcggcctggtaggttgcaacggacacccaatcaacaagatcattggcgaataaaccacccaagctcatcaacatcaggcttacggtacagttaccgccaacaaaagtcctgatgccattatttaatccgtcggtaatgacgtcctgattgacggggtcaagaatgatgatggcgtcatctttcatgcgcagagagcttgctgcgtcaatccagtaaccttgccatccgctttcacgaagctttggatagatttcgttggtataatcgccgccctgacaggtcacaatgatatcgagggcctttagcgcctccagatcaaaggcatcctgaagtgtgccagtggttccgccaaaagacggcgcagcctggccaagctgagaagtagaaaagaagacagggcgaatggcgtcgaagtcgcgctcttcaaccatgcgttgcatgagaacggagccgaccataccgcgccagccgataaaaccaacatttttcataagcgtttttttcctgcaaagatgtgtgctgtataaatgtgccggtctcctcttggcacatctttcaccatacaaaaagcagccaaagtcgcaagtgaaattaatcaatgatagcgaagccatcagtaatgcgacttatcctgctttgttagcacgcagaaagtccgcggcaattatcagggaatttgagttatgaatgaaatcatttctgcagcagttttattgatcctgattatggatccgctcggaaacctacctattttcatgtccgtactgaaacatactgaaccgaaaagacggcgggcaatcatggtgcgagagttgcttattgctctcctggtgatgctggtgttcctgtttgcgggtgagaaaattctggcatttcttagcctacgagcagaaaccgtctccatttctggcggcatcattctgtttctgatcgccattaaaatgattttccccagcgctagtggaaatagcagcgggcttccggcaggtgaagagccatttatcgtgccgttggcaattccgttagtcgccgggccgactattctcgccacgctgatgttgttgtctcatcagtacccgaatcagatggggcatctggtgattgctctgctgctggcctggggcggcacctttgtcatcctgctacagtctagcctatttttacgtctgctgggcgagaaaggggtgaacgcacttgaacgcctgatgggattgattctggtgatgatggcaacccagatgttcctcgacggcattcgaatgtggatgaaggggtaacgaggagagtttttcgaaaagaacccggtagcgtcacaactaccgggcgaacaaacttaactcaacagctggaacgcaatcatcccaacgatggcaccgacagtgccgaggatggtttccatcatggtccaggttttcagcgtttcggcttcggtcgcgccggtaaatttaccgaacaaccagaaaccggcgtcgttaacgtggctgacaacaatgctaccaccagcgatacaaatgctcagcgccgccatttgcgcaccggagtagttcagttgttcaataaccggcatcaccagtcctaccgccgttaaacaggctacggtggcagaaccctgaatgatgcgcactgcagctgccagcacgaagcaggtgatagcaatcggcaggcccatgccggttaacgcttcgcccagtgccggacctacgccagagtcaaccagcacctgtttgaacacgccgcccgcaccaatcaccagcagaatgatccccgccggttgcagcgcgtgaccgcaaatctccatcactttgtcttttggcatgccctgacgcattgccagaccgtaaatcgccaccagacaagcaaccagaatcgcggtaaacggatgaccgataaactcaaaccattcgtaagcagtacttccttccggcacaaaacgcgcggcaatggttttcagccctaccagcaccagcggcagcaggatcaggctcaggctgaatccgaaagatggcattttgccttcgccgagatgcggttcgctgatgtcgtcaggaatatgcagctcaacgtaacggctgatgaagttaccccacagcggcccggcaataatcattcccggaattgccgcacacaggccaatcaggatcatccagccaaagtcggcattcatctggcttgccagcagcatcggcgctggtccaggcaccagaaatgccgccgctgccgccacgcctgcaaataatgggattaccagcttcaccaggttcgtaccggtgtggcgcgccatactgaaagcaacgctaatcagcagaactatcgccacttcaaagaacagcggtagcgcacagaccagccccgcaaggccgatggcataatgcgcgcggctgtgaccgaaggatttgagcattttgacggcaatctgatcgactgcgccggtttcatgtaagatcttgccaaacatagctcccagggcgacaaccaccgccaggaagccgagggtgcctcccatccctttttccatcgtcgctgcgattttatcgagcggcataccagaaaaaaggccagcccccatggacaccaccattaaagccaggaaagcgtgcatacgcgccttcatgactaaaaacagcagcagtaaaacagaccctactgctgttaaaacaagcgttaatgtagtcactacttatttgccttttttaataacctcaatggtgcttgccacaacaccttccagcggttgatcgatatccaccaccagtacatcggtttcgtccgcacccggctcctgcagcgtttcaaactgcgtcaccaacatttgggttttaaagaaatggcctttgcgcgctttcaggcggatttcaatcacatcaaaatcgcctttcaaatagatgaaagagagattcggattaccttcacgcagcaagtcgcgatagtgttttttcaatgcagaacagacgatcaggctcactttattagtgcgctgcatagcaaacgcggcgtcgttcagcgcctgcaaccacggtttgcgatcgtcgtcattcagtggttcgccagacgccattttttcgatattgcgccgtggatggaggaaatcgccatcaagaaacgcggcatgaagttgatgcgccacttcactggcgaccgcagatttgccgctgccgcttacgcccatcaagacgtaaatgtggtgatcatggttagtcgtgctcaaagtggtgcccccacaatacaagaattaaaaatgttacgggtaactgttatcggtaacattgtccagccggacaatatcagaagcaatatccatccatgccttaagtgtataagtgtgagctacttcaaatttgtgggcttaaatagatccgcccggactcaaggtgaaacctaaatctaacattttcggtgtcacagattcgccacgaatacgcgccagcaggcgttcagcgccaatactgcccatccgctcacgcggcgtcagcacgctcgcaagtcgtggctccatcacctgaccaatgtcatgaccgtggaaaccggcaatcgccatatcgtcaggaacttttaaccccagacgctgacattcaaacgccgcgccgaccgccaggtcatcattcgtacagaacacgccatccagctgcggatattcccgccgcgcctggcgaatcagttcaataccggaagagtaagaagaagattgctcaaccatcacgctatatggcaccaggcctgcatccagcatcgcctgttcgtatcccttctgtttgatgatagtacgttcgtcgagacgtgcgccgagataggcaatgtggcgatgcccgcgagcaataatggcagtggtcatctggcgtgctgcttcaaagttatcaaaaccgacggcgatatcaaggcatgggctcttgctgtccatcagttccaccacgggaatacccgccacttcaatcatctttaaggtgcgcggcgtgtgggtacgttcggtgaggatcaggccgtcgatattccaggagagcatggattcgaggcgttcttgctccatttccggtttataaccgtagtgcgccagcatggtctgataaccgtgcgcgtcggtgacgctttcgattccgcgtaatacttccgcgaaaacctggttggtgagagaaggtaacaggacgccaatcgcccggctggtggcgttagagaggatatcgggcgcacgattgggaatatagcccagttcatcaagagccgcggcaatcttgccgcgtagagcgacggaaacctgctccgggttgcgtaaaaaacggctgaccgtcattttggtcacgcctacacggtcagccacatcctgaagtacgggtcttttctttttcatcgtcctgaaggtacaaaagagatagattctcttagtttaacacggacacatcagaaccttcccggggaaaacagtgcttgtttacaattattagatatacactaaatcaattgcatcgcattgtgctaacgacgcggcaaaaccccggaagcgtacatcagcacgcgaccggagcgagcgaggaagcctgcaaaaaggcaggcttcaaagatgccgttgagttttaaaccggcggcagatcgaacagtaacacttcgctgtcgctatccgcatggatggagattgcctgctcatcccagattgccagaccatcgctggtgctggctttcacgccgttaatggtgacattgcctttcaccacctggatccagacgcggcgttcagcggcaatctgatgcacgctctgctcatctttcagcaacgcccagcggtacagttccatatcctgatgcactttcaaactaccatctcgcgcatccgggctgagcaccagctgtttgccctgtacggcatcgaagcgacgctgttcataacgcggcgtaataccgttttcttcaggcatgatccagatctgatacagatgcagacgctcggtgctgcttgggttgtactcactgtgacgaatacccgtaccagcactcataatctggaactcacccgccggaacctgctctttattgcccatgctgtcctgatgctcaacagtaccttccagcacgtaggtcaaaatttccatatctttatgcgggtgagtgccgaagccctgccctgcttcaatcacgtcgtcgttaatcacgcgcagcgcggagaagcccataaagttcggatcgtaatagttggcaaaagagaaagtatgccaggagtccagccagccatgatttgcatgaccacgttcatttgctttgcgtaagtagatcatttgtattcgccccctgaatgatttcgatgggcttagtgtggacccgatctgcctgggatgatagagggtgaaaattgacccctctgttcaaaaaaattgaactattcgaggggccatcaaacttacttagcgagagttactgtggagggagaggcttgctcaaatccgcgttcaaggatttccagattggtaagaacttcagattccttgacgtaatttggcgcaccgtgggtgatggtttgatacaacgcatcataaacgcgcccgtaatcgcccatctccggcttcatctcttctctgaccgtcacgccctcgtcattgacatactccagcacaccgacgctatcatccgctgcgaatcccggttcgcccggcataatattagccttcaggctggtttcctgctggtcgataccgtatttaataaagctacctttcttaccgtgaacgataaatttcggataatcgattttcaccagatggctggttttgacgatggctttcaggtcgccataaaacagttgcgcttcaaaggtgtcgtcaggattggctttattacgcaggctgcggatgtcataagcgacgtgatccgggcgaccgaacagagaaataatctggtccatcgtatgcacaccaaggccataaaacgcgccatcctgcggcagcccaggtttggtttctgccaccgggcggtaatagtcaaaatggctttccacttcaacaatctctcccaacttgccactttcaatcgcttttttcgctgtcaggaagcaggagtcaaagcgacgattctgatacggcgtgacggtcagccctttgcttttcgccaacgcaaacagctctttcgcctgcgcaagtgtcggagtgaacggtttttcgaccagcacatttttcccggcttccagcgcgcgtttcgcgtactcgaaatggctgtccgcgtgggtgcagacaacaaccagcttaacatcgggatcgtttagtacttcgtcgagatcgctggtgaaatggatatgggaataaatgggagcctgttcttccggcttcgcatggcgacgaaaaatatgcgcgacatgccagctatccttgcggttaagtacatacggcagatggtaacgggtggtgcttttgccgaagccaataaaggcgcagttgatgaccatgatttcgtcctttttaaggtggttatttacaccttagcgcaaagcggacgtggttcctactggagtgcgcataacgaacacaagcactcccgtggataaattgagaacgaaagatcaaaaaaaaagccagcacccggctggctaagtaatactggaagcaatgtgagcaatgtcgtgctttcaggttctccgcgagggtcttcctgatcgcgagacaataataatcattctcattcgcacttgtccaacactttttgcaaaaaaatgcatttgactcgcatttgaaagtcaatgatgttgaaagggacatttaccccaaagaggacaaaggaacaaatgctcttcccacgaagagggccgctaaccttagtaccccgccgttaaatcatccacgctgcgcgggtcggatgcgccgtacaactcaccgtccggcccaaccataatgctttgtgtactgcccatcgcctctttcagcgccactttctgaccttttgcttccagcagcttgagcgtatccgggctaaaccctttttcgacacgcagctcgtccggcaaccactgatggtggaaacgcggcgcattggtcgcttcggcgacgttcaagccataatcgatgctattcaccaccatttgcagcactgtagtgatgatccggctaccgcctgggctaccggtaaccagccaggttttaccgtctttcaccacaatggtcgggctcatgctgctcagcgggcgtttgttcggcccgacggcgttggcatcaccgcccaccagcccgtaaacgttcggtacgcccggtttggcggagaaatcatccatctggttattaagcagaataccgctctcgcccgcgacaatgcccgtaccgaaggtggtgttcagcgtataggtcaccgccaccgcgttaccatctttatccaccacactgtaatgggtagtttgattactctcataaggcgcaagcttgccggggcgaatttcgctggatggcttcgctttattgatatcaatttgatcggcaatagatttggcataggctttattggtcagcgcctgccacggtactttgacaaaatccgggtcgccaagatattcgctgcggtcggcgtaggcgtatttctccgcttctgccatgatttgcatcgcatcggcgctgccaaagccgtatttcttcatatcgaagttttccagaatattgaggatttgtacgatatggatcccgccggaggatggcggtggcatggagtaaacctgatacccgcgataatcgccgcttatcggagtgcgttcgaccgctttataggctgctaaatcttctttagtgatcaagccaccgtttttctgcatctcctgggcgatctgttccgcaatcgtgcctttatagaattcgtccgggccgttttcagcaatcatctccaggctctttgccaggttcgcctgcaccagcgtgtcgccctttttcagcggctcgccctctttccagaagatagctttactgttttcgtgattcggcaacacttcgctaccgtaggttttgagatcgtcagccagcgcgtcgttaacgataaaaccatcgcgtgccagtttaaacgcgggctgcacgactttgttcagcggcatggtgccgtatttatccagcgccaggctgaaacctgctaccgtacccggtgtgccggaagccagatggctagtgagactttttttgctgtccgggttgccctgatcatcgaggaacatatcgcgggtcgctttggcgggtgccatttcgcggaaatcgatagccgtggtattgccatttttgctgcggattaacataaaaccaccaccgcccagattccctgcctgcggatgcgttaccgccagcgcgtagcccaccgccacggcggcatcaacggcattcccgccctccttgagaatatccacccccacctgagtggcagtggcgtccacagacgctaccattccctgtttcgcgcgtaccgggtggaagacatcttcctccacaccatagctgacgggcggcgcaggaggcgcggcggcggcgctaaaacaacttccactgagcagagcagcaatggccacccggcgtaaaaacgtcggttttatcatcgttattctccagagattaaggggcaaccccagctaagcctggtatataactctgaattaatcatcgttttgtcgggaagcgagtaaacttaaaggatatcttcagaggaggatacgcgatgaaacgacttctgattcttacggcactcctgccgtttgtcggctttgcacagcccattaatactctgaacaaccctaaccagccggggtatcagatacccagccagcagcggatgcaaacccagatgcagactcagcaaatccagcaaaaagggatgctgaatcagcaactgaaaacgcaaactcagttgcaacagcagcatttagaaaaccagataaacaataattctcagcgggtgttgcagagtcagccgggggagcgaaatcccgcccggcagcaaatgctgcccaacaccaacggcgggatgttaaacagcaaccgtaatccggatagtagcttgaatcagcagcatatgctgccggagaggagaaacggcgacatgctgaatcagcccagcacgccgcagcctgacattccgttgaaaactattgggccgtaattattgggccgtaaagttcggaccaatcacgtcaatcgcatcggtacagatgcaatccacaccccagcgcagcaactctgctgcgcgctggggtttattgacggtataaaccagaatccgcagtccggcgtctttcaactgcatcactcgcgctttattgagtaacttatgattgagatgaatagagacgcagcccagccgcgcggtcagttcgcgccagtcgtcgcgccactcatccagcaacaaaccgcgcggcagttccggtgccgcctgttgtgcagcttctaaagcatcaatctcaaagctactcagcagcggcggcgtcataccggcccacagctcgcgtgccgccagcgccaccattttgcccgttaatggcccggtgccggtggtgggtttgatttcgatattcgccatcatcccgtgttcgcggcaacgttccgccacctggctaagcaacggtagcggctcacctttaaacattttgctgtaccaactgcccgcatccacgcgcagtaaatcctgccagttcagttcacccgcgacgccccagccgttgctggtacgttcgagattgtcgtcatggagcaggaagatctcgccatctttgcttaacttcgcgtcaaattcgatcatcttatgaccgtattttgccccgacgtcgatactcgccagggtgttttccggggccagcttaccgccgccacgatgagcgacgatgcggggataaggccagttactcatactcgttgtcctgtttcaccatcaaaaagatgcagctgattttccgccagatgcagccacagcgtgctgcctgccgtcgggcgctcctgatgcgccagtcgcaccaccagcttctgctcgccccagcgtccgtgcgccaggttatctgcgccgaggatctccagcgtgtccatcaccatcggtacgccgccttctgcctggctgcttagcgcaatatgttccgggcgaatgccgagagtcattttacgcccggcatactgacggtagccaccgtttagcggcagctcaataccgccgtccagttcgaaatgcgtgccttcgttattcacgcggcctgtcagcaggttcatcgccggactgccgataaaactcgctacaaacaggctggcgggcttttcgtagacttcaactggtgtgccaatctgttcggcaacaccgccgttcatcaccattactcgctgggcgagcgtcatcgcttcaacctgatcgtgagtaacgtagagactagtcgttttcaggcgacggtgcaactgttgcagttcaagacgcatctgcacgcgcagcttggcatcgaggttagagagcggctcatcaaacaggaacaccgccggatcgcgcacaatcgcgcggcccatcgccacacgctggcgctgaccgccggaaagctcgcgcgggcgacgtttgagcagaccgtccagctccagaatgcgcgccgcttctttaacgcgctcggcaatttgctgcttgcccatgccgcgaattttcagcccccacgccatgttttcttcgacactcatatgcggataaagcgcgtagttctggaacaccatcgcaatcccgcgatcttttggctccatttcagtcacgcgctggtcgttgatccagatatcgccttctgtcacccgctccagcccggcaaccatgcgcagcagcgtgcttttcccgcagccagacggcccgaccatcacgataaattcgccatccgccacatcaagggtcagcggtttaatgacctgggttttaccatcccagcttttggttactgcctgtaatttcagtcctgccatcttatttctcactatcgaccaggccgcgcacgaaggcacgctgcatcactaaaacaatcaccaccggagggataagcgttaacaacatcgccaccatcacactgttccattccgtggtgccttcgcctgtagcgatcatccctttgatccctgccacggtggtgccgagatccacatcggtaataatcaacaacggccacaaatactgattccagccgtagataaaggtgatcacaaacagcgccgccagattagttttggagagcggaaaaacgatgtcgcaaaagaagcgcattgggcttgcgccgtcgatccgcgcggcttccaccagctcatccggcagcgtcataaagaactggcggaacaggaaagtagcggtcgcgctggccatcagcggcagcgttaaaccggcgtagctgtcgagcatctgcaggttggcgatgacttccaccgtcgggaagatacgtacttcaaccggcagcatcagggtgataaaaatcatccagaagaagaggttacgtagcggaaaacgaaaccagacaatggcaaatgcgctgagcatgctgacggtaattttgccgagcgtaatgctgaacgccatcacaaagctgttaagcaacatccgccagaacggcgcgctattcgtgcctaccccgttcacccagatgttgtggatgttttccagcagatgtgtgccggggatgagcgtcatcggcgcggcatagacggcctgtttatccagcgtcgccgcgacaaacgccacgtacagcgggaagaggatcaccgcgatcccgaggatcagcatggtatggctgaatatcgtcagccacggacggttctcaatcattggtaacgcaccttgctttcaacatagcggaactgcaccaccgtcagcacgatgacgaggaacatcaacaccacgctctgtgcggcagagctagccagatccagtccggtaaaaccttcgcggtagatcttataaatcagcgtcgtggtggcctgaaccggcccgccggacgtggcggcgtcgatcaccgggaaggtgtcgaagaaggcatacaccaggttcactaccagcaggaagaaactcaccggggcgataagcggcagcgcaatcttaaagaagcggcgaatcggccctgcaccgtcgatggctgcggcttcgatcaagctacggggaatggattgcagcgcggcatagaagaacaggaagttgtagctgatttgcttccatacactggcaaacaccaccagaaacattgcctgaccgctgttttgcgcgtggttccagtcgtagccgaactccgcgagaaaatgggtgatcagcccgcgaccggggttaaacaggaagatccacaatacggcggcaacggcgggagccacggcgtaaggcagcaacattaaggtttgatagaaacggctgccgcgcacgatgtactccaccagcgccgcaaagaacaggcttaccagcaaaccgctgacggtgacaaaggtgctgaattttatcgtcgtccagaaggagtcgagatagtagctgtcatggaacagcgtgacgaagttatccaggccgacaaactggctggagaaaccaaacggatcgacgctttgtaggctgtaccacaacgcttcgcccgcaggccagataaaaaagataacggtgatgatgagctgcggcgcgaccagcagataaggcagccagcggctgcggaacaccggacgggaactactcattacggttaattcctgaactgtgccggatgcgcttcgcttatccggcctacacgcgatgccaggtcagataagcgaaacgcatccgacattacactgattaagacttcgtgcttttctcaaagcggcgcagcaactgatttccacgctcaacggcggtatccagtgcctgctgtggtgtcttcttaccggtccacacgctctccagctcttcatccacaatcacgcggatctgcggcatgttgcccagacgcagccctttggtgaacggcaacggcggcttattcagcatctgacgcgtcgcggtatccgcccctgggtttttctcataaaagccctgctcacgggtcaggtcatacgctgctttggtgattggcagataaccggttttctgatgccactcggcagcgttttctggcttcgcgaggaaatcgaggaacttcgccacaccggtatacgtttctttatctttaccctgcatcacccacaggctggctccgccgataatggcgttttgtggcgcatctttcgcatcggcgtcgtaaggcatcatgcctacgccgtagttaaatttggcgtactcgcgaatgttggcaagagaaccggaagaggcggtggtcatcgcgcaatcaccgttatagaacttctcggtggattcatccttacgaccgacgtagctgaagtcgcccttcttgttcatctcctcgagcatggcgatgtgtttcacctgctccggcttattgaactccagcaccgcgtccgtgccgtcaaagccgttgtttttgctggcaaacggcagaccgttccaggcgctaaagttttccagttggatccagccctgccagccgctggcgtagccgcacttcatgccggaggctttcagtttcgcggcatagtccgccagatcctgccaggttttcggcggctgttccgggtctaatcctgctttcttgaaggcgtctttgttgtaatagagaacgggggtgctgctgttgaatggctgggagagtaagtggcccgttttgctgtcggagtagtaaccactaaccgtcggcacaaactggctctcatcgaactgaatccctgcctctttaaacacgtcatacaccggtttaatggctttgctcgccatcatggtggcggtgccaacttcataaacctgcaaaatagccggcgcgttgccggtacgaaatgcggcaatccccgcgcttaaattctgttcgtagttgcctttataggtcggtacaattttgtaatccgggttttcggcgttaaaacgttgggccagagaatccacctctttacccagttccccttccatagaatgccagaacggaatggtcgtcactgcctgtgcattccccattaacgccagtccgagcgccagtgcactagctgtataatgtaacggtttcatcgtttatctctcttgttgtaccgaatgcgcgaattcacgcgttttatgctcgcggggtaacatgacatgctcgaattacagaaaaataacttttttgttacatttgtaagatagtaaggtgtcagaaagatgacaaggcggtgacggcgtgggtgagggaaaatgggagatggggcacggataagcgggaaaatatagaaggtctgaatcaaactctacagattgctcatcgtttcatgccggatgcggcgtaaacgccttatcaggcctacaagatcgtgcaaattcaacatattgccactcacccagtaggcctgataagcgcagcgcatcaggcaattttacatttgtcacctgtctcaaaggagtcttttgactccctatcaatcaacgtgttattacccgcctaaatacgcacttctcaccgcttcattcgccagcagcgcatcaccagtatcggaaagcactacatggccgttttccagcacgtagccgcgatccgccagctttagcgcctggttggcgttctgctcgacgagaaagatagtcatcccctgctcgcgcagctgctcgatggtgtcgaaaatttgctggatgataatcggcgcaagaccgaggcttggctcatcaagcagtagcaaacgcgggttgctcatcagcgcacgaccaatcgccagcatctgctgttcaccgccggacatggtgcccgcccgctgaatacggcgctcatgcagacgtggaaacagctcatacacccactttatgcgctcctggaactggtcgcgttcagcaaaaaaaccgcccatcgccaggttctcttccaccgtcatccggctgaagacgcgacgcccttccgggacaatcgccaccgcttcgcgcatgattttcgctgtctgccagtcggtaatgtctttatcatcaaacacaattcgcccgctggtggcacgcggatcgccgcataacgtgccgagcaaggtggttttccccgccccgttcgcgccaatcagcgtgacaatctcgccctgattgatatgcaggctcacctcatgcagcgcctggattttgccgtagtgggcgctgactttgtcaaaggacaacatgactttttccatcttatgcctcacctaaataggcacggatcacgtccgggttattacggatctgctccggcgtaccgtttgccagcggcgtcccctgattgaccacgtaaattcggtcgctaattcccatcaccagcttcatatcgtgttcaatcaacaagatagtggtgttgtgatgattgcgcagttcggcaatcagctcatccagctctttcgtctctttcgggttaagacctgccgcaggttcgtcgagcattaaaatctccggctgcgtcaccatgcagcgggcaatctcaagacggcgctggtcaccataggccaggttactcgcctgacggttggcgtgttccagcaaaccaatgcgctcaagccaggtcgcggcgcggtcgagcgcttcgctctgggcgcgacggaaggatggcgttttcaacaggccagagaacagcccggttttcagttgctgatgctgcgccaccagcaggttttcaattaccgtcatttcacggaacagacgcacatgctggaaggtgcgcaccacgcccatgcgggcaatttgctgccccggtaaaccttccaggtgctgatcgcgcagtaaaatggtgccgccggtgggtttgtagaatccggtcagacagttaaaaaccgtggtttttccggcaccgttagggccgattaagctgacgatctcctgcgggtacagttcaagattgacgttgttcaccgccagcaggccgccgaagcgcatcatcaggccgttaacagataataatggctgactcatgcctgctctcctttcgctgcgccgtttttcagcttcagttgcgggcgcgtcatgggcagcaagccctgcggacgccagatcatcatcagcaccatcaaaccaccgagcattaacatgctgtattcgttgaaatcacgcatcaactcgcggctcaccaccagcaaaattgccgccagaatcaccgcaaattggctgcccataccgccgagcaccactatcgccagcacaaacgcgctttcggcaaaggtgaaggattccgggctgacaaagccctgacgcgccgcaaacagcgttccggcaaaaccggcaaacgcggcacttatggtaaaggcagtcagcttgatacgacgcgggcttaagcccaggctacggcaggcgatttcatcttcacgcaacgcttcccacgcacgccccagcggcatccgcagcaggcggttaatgacaaacaggcttagcaccaccagcagcaacgccaccaggtagaggaagatgacacgatcggagggatcgtatttcaggccaaagaaattactgaacgtgtcccagccgccttcacgagcggtacggctgaactcgagtccgaagagtgtcggtttcgggatctgactgattccgttcgggccgccggtaatttcggtgttattgagcagcaatatgcgcacaatttcgccgaaaccgagggtaacgatcgccagatagtcaccgcgcaaacgcagcaccggaaaaccgagcaggaagcccgccgccgctgccattaatccagcaatcggcaggcaggtccagaagcccaagccgtaatagtgattgagcagcgcaaaagtgtaagcgccgatggcgtaaaaaccgccgtaccccagcaccagcagaccagaaagaccaacaaccacgttcagcccgagaccgaggataatgtagatcatggtcagggtggcaatatccaccgtcccgcgactaaccataaacggccacgccaccgcaagcaccaacagcgccacgaggaacagtttctgcttcaccgtggagccatcaatggcgggcagaataaacttcggtccggaaacgcttttcaaccctttctggaaagccggtcgcaaaagctggaagaaaaagaccaccgccgtgccgataaacacccactgccaacggacatcgctagccgtgtcgaccaccagtttggtgccatccagctccagttgcacgcccataaagacgcccgccagcacaaagaacatcgcggcagagagcagcgccattgcaatatgcatcggtttcatactttctctacctccgggcgacccagaataccggtcggcatcaccagcagcaccagaatcagcagggcgaaactgaccacatctttatattccgtactcagataggcagaagagagcgcctccgcaatccccagaatcaggccgccaatcatcgctcccggaatgctgccaatcccaccgagcaccgccgcggtaaaggctttcatcccggccataaagccgatgtaggggttaatgacgccgtagaactgaccgagcagcacacccgccaccgccgccatcgccgcgccaatcacaaaggtcagcgcaatcacccggtcggtgttaatgccaagcagactcgccattttcagatcttccgcgcaggcacgacacgcgcgacccatgcgggaatagcgaatgaaaatcgtcagcgccagcatggcgaggaaggtaacaatccagatcaccgcctgcatggtggtaatagaggcagagaagttttcgctatgccccaccacccactgaccgttaaacaggctcggcagcgccacgtcgcggctaccttcggtcaggctgacgtagttttgcaggaagatggacataccgattgcagagatgagtgcaatcaggcgcttagagttacgcaccgggcggtaagccacccgttcgatactccagccgtaggcgctggcaatgacgattgcgccgacgaatcccgcagctaccagcagccagccggtatcaatgcccatcatcatcagcgcggcgatgatcataaaactgacgtagctgccaatcatataaacctcgccgtgggcgaagttgatcatgccgataatgccgtaaaccatggtgtagccgatggctatcagcgcgtaggtactgcccagcgtgacgccgttaaacatctgctgcaagaaatacaaaaactgctcagacataaggtaacctttctaaacccgcccgcattttacgggcggtgggatgatcacttggctgccgtggaactaccgtcggcgtgccactggaagacaccaaaatcaaatcccttaagatcgcctttttcatcccagttcagcggcccaatcacggtgtttgcaccgttagcttttaaatctttcaccagcgccagcggctcatcgctgccggtacgctcaagggcagtcgccagagattgcaccgccgcgtaggtgatccagacataaggcccggacggatctttcttgtctgctttcagcgcatcaacgatgccctggtttgccggatcctggtcatagcgttttggcatagtgaccaacatgccttcggcggcatcaccggcaatgttgctcaagctcgcattacccacaccttccggccccataaactgggttttcaggccaacggaacgggcctggcgcagcatctgccccatttccgggtagtaaccgccgtagtaaacgaagtcgatgttttcttttttcaggcgggcgatcagcgcggagaaatctttctccccggcggtaataccgtcgaagaagacgacgttggcgttagccgctttcagcccgtcctgcacgctacgcgccagcccttcgccatactgttgtttgtcgtgaatgatggcgatgcgctggggcttcaccgtctcaagaatgtattttgccgccgttggcccctgggaagagtccagcccggcagtacgcataatgtgttgataaccgcgttgggtcagctccgggttggtcgctcccgggctgatcatcagaataccttcgtcttcatagatatcactcgcaggctgggtagaagaagaacacagatgaccaataacgtatttaatgccgtcattaacgattttgttggcgaccgcaacggcttgtttcgggtcgcatgcgtcgtcatattccacgccaaccagtttatcgcccttaattccccctttggcattaatgtctttaattgcctgacgcgcgccgttaaattccatatcgccccactgggcaatcgggccggacatcgcgccgacaacggcgactttaatatcgtcagccatagcggtgtgactaattgccagtgcaatcatccctgcgatgatagttttcgcattccgtttcatagtcaaaaatccccattcgtgatgttgtgttgctttgtttttatgtgttaacaaatcagactgttctttttttatactgcactgtttttgcctgtctgattaaggggttagcgcagtattttgtgataatagcgattaaaatccctatttttcagtcgattaagaacagataatattctgaatttattgatagataaacagaaaaaagtgcctttgtcagcataaaataacggcacaaagggcggaataattcactatcattcaggggattatgctggacatttttcattctctaatgttttaattttgtaattattgctgttaaaaaattaatcacctgccaaaagaaataaaaaagagaaagcctccgattaaattatttcgctacactggttccacttttgtgatttacacgggttacccatgaagctgaccatcattcgattagaaaaatttagcgaccaagaccggattgacctgcaaaagatctggccggagtattccccttccagcttacaggttgacgataaccaccgtatctacgccgcgcgttttaacgagcgcctgctcgctgccgtgcgggtaaccttaagcggcaccgagggagcactggattccctgcgcgtgcgggaagtcacccgccgtcgcggtgtggggcaatatctgctggaagaggttttgcgtaacaatcctggcgttagttgctggtggatggcggatgcaggcgtggaagatcgcggtgtgatgacggcgtttatgcaggcgctggggtttacggcacaacagggcggctgggagaagtgttaatcgtcaagtttgatttcaaaagtgatattgcctgatgcgctacgcttatcaggcctacaatgtgtgttgcaatttactgatttctttggatcttgtaggccggataaggcgtttacgccgcatccggcatgaagcaacgtactcgatattagcaatttggcggcaacccaaagttgccgattaatgattacttcgcatcggtcgccgtgccgttggcgtgccagtcaaatacgccgaactcaaagcctttcagatcgcctttctcatcccaggtcagcggtcccattacggtatccacggagttcgctttcaggtatttggcgatttcagccggatcgtcagactgattcaggcccgcctgcaaagattgcagcgcggcgtaggtggtccaaacgaatgcgccacttgggtcctgttttttcgctttgatcgcgtcaacaatgggtttgttcgccggaacctgatcgtagttcttcggcttggtcaccagcagcccttccgcactttcgcccgcaatgttagacaggctaacgttagccacaccttccggccccataaactgagttttcagccctgccgcgcgtgcctgacgcaggatttgccccatttccgggtgataaccgccgtagtaaacgaagtcgatattctcttttttcagacgcgccaccagcgtactgaaatctttttccccggcggtgatgccatcaaagaacaccacgtttgcattgcctttcttcaggccgtcctgcaccgctcgcgccagaccttcgccgtattgctgtttgtcgtgaacgatagcaatacgctgcggtttcactttctcaagaatatatttcgccgccgtcggcccctggtcggagtccaggccggtggtgcgcaggatcagctgatagccacgggcggtcagctccggcgcggttgccgctggggtgatcattaaaatgccttcgtcttcgtagatgtcagacgcaggctgcgtactactagaacagaggtgaccaatcacatatttaatgccgtcgttaacgactttgttcgccaccgcaaccgcctgtttcgggtcacaggcatcgtcatattttacgatttgcagtttgttgcctttaatgccgcctttagcgttgatatccgcaaccgcctgctctgcgccggtaaactcctggtcaccgtactgcgcaaccggaccggacattgcgcccacgaccgcgactttaatatcttctgccagagccatattgctgaatgccagcgcgatacatcctgccagtaacgctttaccctttatgttcatcctgagaatccccattcttctggttattacgtgtgttgtgatgttgtttttcagcactttatttcgttttatgcatgactacccgtgctttagcagcatactctgctaaaacatacccgatttttatgatattggaatagctattttgacagtttattaacaatctgcgtggggattggcgttttgccggaggggaaattgattattacagaggcccaaaaaacaaaaaccccggactctcatccagggttctctgcttaatagcggaaattacgcttcaatggcagcacgcaattttttcatcgcgttcttttccagctggcgtacacgctcagcggaaacgccgtaacggtcagccagttcctgcaacgtggacttgttgtcttcgtccagccagcgcgcacggatgatgtcctggctgcgttcgtccagaccctgcatcgcgtcggtcagacggtttgccgcctgctcttcccagttatcatcttcaatgccgtcggcaaagttagaacttttatcctgcagatagagcaccggagccatcggctggctgtcggaatcgtcgtcggaagacaggtcaaaggtcatgtcctgtgccgccatacgactttccatctcacgtacgtctttgctggttacgcccagttcacgggccaccatttcgacttcatcctggttaaaccagcccagacgctgcttggttttacgcaggttgaagaacagtttgcgctgcgctttggtggtcgcaactttgacgatacgccagttacgcagaacgtattcgtggatctctgctttgatccagtgaacggcgaaggagaccaggcgcacacccacttccgggttgaaacggcgcactgctttcatcaggccgatgttaccttcctgaatcaaatccgcctgtggcaggccatagcccgcataattacgagcaatatgaacaacaaaccgcaggtgagacaggatcagcgttttagctgcttccagatcgccatggtaatgcagcttttcagccagcgcccgctcctcgtcagcgctcaacatcggccacgcgttagctgcccggatgtaggaatccaggttgccaactggggctaaagctaaactttgcattttgtcagtcattcaaatcctctcaatcgatatcttctggcgcttcagtggtagcaacaactgtgccagagcttaagagcaacgaggttatcattcactgttttatcagaccgtgattttatccacaagttcaatgcaagcttgtgaataaattacgcacaaaatgtgacatagagatgaaataccgggaagagacaacggggtctctttccctgctacggaacccattgcagggaaagagtataacacgcttttattattcaggcgtaaagtggcgtaaatgttgtaccgtggcaagccacgctgccacccagccaatcatgctgcataccagcagcaatagcaggcattcatcgaaacttaagccattgatatcaaacttcgttccgaaaacctgtgccacttccgcaaccgcgctactcaatcgcagcaccagaatttcactcaaaattaaactcaacaatgcgccagaaaatcccagcagtgcgccaccatacaggaacgggcgcaggatgaatccatctgtcgcaccaatcagtttctgtacgttaatggagtcacggcgagcaaagatactcagacgcacactgttaccgatgacgaggaacacggccgccaccatcaacacgccgatcatcgcgctaacgcgcccgaccagcccggtcaacgccgccagacgggcaaaccagctgtcatccatccgcacttcgtcaatgccgttaatctgcgtgatacgatcacgcagcgtattcagactttccgtcccctggaaatcgagtttcgggatcaccaccgccactgccggaagcgggttttcttccagcatatccagcgcaccaccaaaaccagaccagttacggaactcacccagtgcgtcttcacgagaaagatagttcactttctccacgccttgctcggcctgcaactgtgccaccacgcccgcagcagcgtcatcgtccagcgttttttgcagataaacagtgatttgcggactcggataatactgcgtcgccgcctggttaacgtttttgtacaccatataacagacgctgggcagcgtcagagaaatggcgataaccatcaccgttaaaaacgtggcgaacggtttgcttttcagatcctgcaatgcgccgtggaaggcatagcgcacctgttcgttgaaaacgttggttttgcgatttaccggttttgggctggatttcgcgcgttttggtgcgttacgaccgccgtcgccactgccgccgacgcttttacggaagcgatcaagacgcccgccaaactgccgaatatgattgattgcatcgcgcttattcatggcccacgcctccatgcaagtgaccatcgctcagggtgagcatgcgataggaacgccggctgatcaggttgatgtcgtgcgttgccatcaatacggttaccccaacgcggttaaactcttcaaacagacgtaaaatgccttcgctcagcgcgtcgtccaggttaccagtcggttcgtccgccagcagtaccgcgggcttgttcaccaccgcgcgggcaatgccaacacgctgttgttcaccgccgctaagctgaatagggaagttcttcgctttgtccagtagcccgactttatccagcgccgcgctcacccggcgacgaatatcgtcaccgctggcaccggcgataatcagcgggatcgccacgttatcgtagacagtacggtccatcagtagatggtgatcctggaaaatcatgccaatctggcggcgcagaaacggaacttcacggtttttcagacgcgtgatgtcatggccgctaaaccagattttcccggcgctgggccgctcaatcccacagatcagcttcaggagggtacttttccctgcgccggaatgaccggtcagaaacgccatctcacccggctgcatatggaacgtaacgccctgcagcgcctgtctcccaccgagataagccttgctgacatgttcaaagcgaatcattgttaatcctctcgggcaaaaagtgcctctataaagtcgtccgccttaaacggacgcaaatcctcaatacgttcgccgacaccaatgtagcggatagggataccaaactggtcagccacgctgaaaattaccccgcctttcgccgtgccgtccagtttcgttagcgtgatgccggttaagccaacggcttcatggaacagtttggcctggcttaccgcgttctgcccggtgctggcatcaatagtcagcataacttcatgcggcgcttcaacgtcgagtttcttcatcacgcggacgattttcttcaactcttccatcaggtggcttttgttctgcaggcgtccggctgtatcggcaatcaggacgtcgatattacgcgctttagctgcctgaatggcgtcgaagataacagaggcggaatccgccccggtatgctgggcaatcaccggaatattgttgcgctgaccccagacctgaagctgttcaaccgcagctgcacggaaagtatcacccgccgccagcatcacgcttttaccctgctgctcaaactgacgcgccagcttaccaatcgtcgtggttttacccacaccgttgacgcccaccatcaggatcacaaacggcgctttgccttcaacattcagcggctcatcgactttcgccagaatctcgcccatctcttctttcagcaggccatagagcgcctcggcgtcacgaagctgcttgcgggatgcgccttccgtcagattggtgataattttacgtgtggtttccacacccacatcggcgatcaaaagctgctcttccagctcctcaaacagatcatcgtcgatttttttaccgcggaacaggctgataaatccggaaccgagattttctttggtttttaacaggctgcgtttcaggcgcgcgaaaaaaccttctttggtcggtttttcctgctcctgagcgatttcttccaccggctgctcttcttctgccggaggaaccaccatcaccgcctcttctgccgcttcggcagccagcgccgtttccagctcttcgtcggtaatttcttctttagccgcttcttcttccgccgcttcgacaatctctacggtttccgcttcagcctgccactcttctgggctaaccgcttcggcgttgacgtcttccggcaacggcagctcttcacgttcgatagccactggctccggcgtttcttctacgaccggttccggctgtgcaacgacttccgcttcaggctgcgctttttcactttcagcaacctgttcagtgacttccacaacgtcggcagcaaaagtttccgcctcggcttcagtatgcgcttgcggctgctcttcaacggcttgttcagaggccttcacaggctcttgcgcctgaacgatttcttctacaaccggttgttcattctgaacttctgtctctttttccggggtctgctctttttgaccaaagcccagccaggaaaaaaagccacgttttttttctttcgccatttgcgactacactcctcgctgttgcttcatggcacagcgttaacgctatgtacatagcagctaaaaaaatgatgaaatagtctatcacttaacttaattcacatcaccgcctgcaagtatgtgttatctggcggattgagcaatttatcatgaaaaaaccgaatcattccggcagcggccaaatccgcattattggcgggcagtggcgaggccgtaaactcccggttcctgatagcccaggtctgcgccccaccaccgaccgcgtacgcgaaacgttgtttaactggctggctccggtcattgttgacgcccaatgtctggattgcttcgccgggagcggcgcgctggggctggaagcgttaagccgctacgctgcgggggcaacgttgattgagatggatcgcgcggtttctcagcagttaattaagaatctggcgacactaaaagcaggcaatgcacgcgtggtgaacagcaacgcgatgagtttcctggcgcaaaaaggtacaccgcataatatcgtgtttgtcgatccaccgttccgccgtggcttgttagaagagacgataaatttactggaagataacggctggctggctgacgaagccctgatttatgtcgaaagcgaagtcgaaaacggtctgcccactgttccagcaaactggagtttacatcgggaaaaagtggcgggtcaggtggcttatcggctgtatcaacgcgaagcacaaggagaaagtgatgctgattaatattggtcgtttgttaatgctctgcgtttggggatttttaatcctcaacctggtgcatcccttcccacgcccgctgaatatcttcgttaacgtggcgctgatttttaccgtgctgatgcatggtatgcagctggcgctattgaaatccactttaccgaaagatggcccgcagatgaccaccgccgaaaaggtacggattttccttttcggcgtgtttgaactgctggcctggcagaagaaatttaaagttaaaaaataaccttattgttcgcctacaaagctgacaaagcgcgttcctttatagctcagcgtacctttatcgcccactgtcagggcgtggtactgctgggcgtcgaggcgaaacgtctgctccattcctccgctttgcggtttgaagcttgcctcatagcgtatactggtgcctgccggagtcacttcctgctggcggctacggcgatcgttaatcggtttttcccgcttgttgctcaccaccaccagcttttgctggagcggagccatatcattatcagctttttcccgtcgctgttgcataaaacgaaagcttgcggcgacgacaattaagccaatgataacaataaagaaaagaggtggtttgctcatctttatccctcatcggaaaatgcggaaataagcataccctgccagttatggtgttgtcatccgtccaccctcgccactaaactggaagcaagaccgtaggcattccgcttacgaaaaaataacgaattcaaggaactaagatgctttggagctttatcgctgtctgtctttccgcatggctatctgtggatgcaagctatcgtgggccaacctggcaacgctgggtgtttaaaccgttaacccttcttctcctgctgttactggcctggcaagcgccgatgttcgacgccattagctatctggtgctggcagggctgtgcgccagtctgctgggcgatgcgctaaccctgttgccacgtcaacgtctgatgtacgccatcggcgcgtttttcctcagccacctgctgtacaccatctatttcgccagtcagatgacgctctctttcttctggcctctaccactggtgctgctggttctgggtgcgctgttactggcgattatctggacgcgcctggaagagtaccgttggcctatctgcacgtttatcggcatgacgctggtgatggtgtggctggcaggtgaactgtggttcttccgtccgaccgctccggcgctctctgcgtttgttggcgctagcttgctgtttatcagtaactttgtctggctggggagccactatcgccgacgcttccgtgcggataacgcgattgctgcggcctgctactttgccggtcacttcctgatcgtccgcagcctgtatctctgataaaacttgactctggagtcgactccagagtgtatccttcggttaatgagaaaaaacttaaccggaggatgccatgagcactcctgacaatcacggcaagaaagcccctcaatttgctgcgttcaaaccgctaaccacggtacagaacgccaacgactgttgctgcgacggcgcatgttccagcacgccaactctctctgaaaacgtctccggcacccgctatagctggaaagtcagcggcatggactgcgccgcctgtgcgcgcaaggtagaaaatgccgtgcgccagcttgcaggcgtgaatcaggtgcaggtgttgttcgccaccgaaaaactggtggtcgatgccgacaatgacattcgtgcacaagttgaatctgcgctgcaaaaagcaggctattccctgcgcgatgaacaggccgccgaagaaccgcaagcaagtcgcctgaaagagaatctgccgctgattacgctaatcgtgatgatggcaatcagctggggtctggagcagttcaatcatccgttcgggcaactggcgtttatcgcgaccacgctggttgggctgtacccgattgctcgtcaggcattacggttgatcaaatccggcagctacttcgccattgaaaccttaatgagcgtagccgctattggtgcactgtttattggcgcaacggctgaagctgcgatggtgttgctgctgtttttgattggtgaacgactggaaggctgggccgccagccgcgcgcgtcagggcgttagcgcgttaatggcgctgaaaccagaaaccgccacgcgcctgcgtaagggtgagcgggaagaggtggcgattaacagcctgcgccctggcgatgtgattgaagtcgccgcaggtgggcgtttgcctgccgacggtaaactgctcagtccgtttgccagttttgatgaaagcgccctgaccggcgaatccattccggtggagcgcgcaacgggcgataaagtccctgctggtgccaccagcgtagaccgtctggtgacgttggaagtgctgagtgaaccgggagccagcgccattgaccggattctgaaactgatcgaagaagccgaagagcgtcgcgctcccattgagcggtttatcgaccgtttcagccgtatctatacgcccgcgattatggccgtcgctctgctggtgacgctggtgccaccgctgctgtttgccgccagctggcaggagtggatttataaagggctgacgctgctgctgattggctgcccgtgtgcgttagttatcagtacgcctgcggcgattacctccgggctggcggcggcagcgcgtcgtggggcgttgattaaaggcggagcggcgctggaacagctgggtcgtgttactcaggtggcgtttgataaaaccggtacgctgaccgtcggtaaaccgcgcgttaccgcgattcatccggcaacgggtattagtgaatctgaactgctgacactggcggcggcggtcgagcaaggcgcgacgcatccactggcgcaagccatcgtacgcgaagcacaggttgctgaactcgccattcccaccgccgaaagtcagcgggcgctggtcgggtctggcattgaagcgcaggttaacggtgagcgcgtattgatttgcgctgccgggaaacatcccgctgatgcatttactggtttaattaacgaactggaaagcgccgggcaaacggtagtgctggtagtacgtaacgatgacgtgcttggtgtcattgcgttacaggataccctgcgcgccgatgctgcaactgccatcagtgaactgaacgcgctgggcgtcaaaggggtgatcctcaccggcgataatccacgcgcagcggcggcaattgccggggagctggggctggagtttaaagcgggcctgttgccggaagataaagtcaaagcggtgaccgagctgaatcaacatgcgccgctggcgatggtcggtgacggtattaacgacgcgccagcgatgaaagctgccgccatcgggattgcaatgggtagcggcacagacgtggcgctggaaaccgccgacgcagcattaacccataaccacctgcgcggcctggtgcaaatgattgaactggcacgcgccactcacgccaatatccgccagaacatcactattgcgctggggctgaaagggatcttcctcgtcaccacgctgttagggatgaccgggttgtggctggcagtgctggcagatacgggggcgacggtgctggtgacagcgaatgcgttaagattgttgcgcaggagataaggcaaaccgatcgcaacattgagcgcgatcggtcccctcgcccctctggggagagggttagggtgaggggaaaaggcggcatcgaagccaatcagcccctatcaaccgcctttacgaatcaaataacgataaggcagtccatccgtctctttagcaaccagttcgtgttccataaaggtacaaaacccaggaatatcgcgggtagtggccggatcgtcggcgataatcagcaacgtttcgccaggctgcatattgcgcacggttttgcgcaccatcatcaccggttccgggcagcgcaggccaagcgcgtcgagtgtgtggtcagggctggaaaagagatcggtcattttcttctcatcacttaaaaaaacggcgctagtttacgccctgtgagtccgtaagcaaactaggttaacgattgcgtgaaaattaaccattgcattgtcaacgtaaagcagtatcatgcggcggctcgaaaaaagggtaagcacgttattatgttaaggtaacagacgtgtcgtacgtattgggttccctcaccccaatggttaatcaaaaaggtacaatatgaacgttttcagccaaactcaacgctataaggcgttgttctggttaagcttatttcatctgctggtgatcacctccagtaactatctggttcagcttcccgtctccattttgggtttccataccacctggggcgcgtttagctttccgtttatttttcttgctaccgacctgaccgtgcgtatttttggcgcaccgctggcccgacgcattatcttcgcggtaatgatccctgcgttattaatctcctacgtcatcagcagcctattctatatgggttcctggcagggattcggcgcactcgcccacttcaacctgtttgtcgcccgtatcgccaccgccagtttcatggcctacgcgctggggcaaatcctcgacgtgcacgtttttaaccgcctgcgtcagagtcgccgctggtggctggcaccgacagcgtccacactgttcggtaacgtcagcgacacgctggcctttttcttcattgccttctggcgtagcccggatgcctttatggctgaacactggatggaaatcgcgctggtcgattactgtttcaaagtgttaatcagtatcgttttcttcctgccaatgtatggcgtattactcaatatgctgttgaaaagactggcagataaatccgaaatcaacgctttgcaggcgagttaaaggttcgttatcagagttgtgataagatggatgaatgagccgttatggccgtttatcgaaaggaagaagtcaatgcgcaatctggttaaatatgtcggaattggcctgctggttatggggcttgcggcctgtgatgataaagacactaacgctacggcgcagggtagcgtcgcggaaagtaacgctaccgggaatcccgtcaacctgcttgatggcaagttaagtttcagcctgccagcggatatgaccgaccagagcggtaagctgggaacgcaggccaataacatgcatgtctggtccgacgccaccgggcagaaagcagtcatcgtcatcatgggcgatgatccgaaagaagatctggcggtgctggcgaagcgtctggaagatcagcaacgtagccgcgatccgcagctgcaagtggtaaccaataaagccattgagctgaaaggtcacaaaatgcagcagttagacagtattatctccgcgaaaggccagacggcgtactcttccgttattctgggtaacgtgggtaatcaactgctgaccatgcaaattacgctgcccgctgacgatcagcaaaaagcgcagaccaccgcagaaaacatcattaatacgctggttattcagtaagttttaagaactactggcggcctcagggacgtgttccggaggccgtttttttaatcgccacgtcagtaataacgcgattgcgaccagtcccgccgccgccagataaatcaccggtacgcccgcccagctcatcaccagcccagccagtggtccagtcacgccaaggcttaaatccataaatacggtgtaagttgccagcgccgccccctgattttgctgcggaaccgcttttaccgccactacacccaatgccgggaacaccaggctaaacccggcccccgccagtaagacgccgattttcgccatccacggcatagtcgccacgccaaccagtagcaggccgattatctcaacgctaaagcaaatcatcgctacgtttaagccaccgatacggttaatgccgttagggaataacaaacgcgtaccgacaaacgcacagctaaacagcgtcagcgcgaaagccgcaccgtcccaacctttagcgtcataaaacagcgtgataaaggtggcgatgacgccaaatccggcggaagccagtgccagcgccataccgtacagccagacgcgcccaagcaccgcgcgaaacggcagcggtttgcctttactggcttttaccgtcggacgcgggatcgccaacaaaatggccaccagcgccacgcccataatgattaacgctaacgcctgcaagccgccccagtgataaaacacgacgcctaacggcgcacccatcgccatcgccccgtaagtgacaatgccgttccagctaatcacccgcccgatatgcaggctgccaaccacgccaacgccccatagggtgcttcccgttccggcaaaactttgcccaatcccaaggatgacgcgccccaggcaaagtaataacaggctgatgacaggcagactggcggttaatcctgccgtcagataccccagaccgctcaaaaagcagccgcataaaccgaagacgacaatctttttgggtcccaggctatcggcgtaacgtccggcatgagggcggctcagcaaggtggcgaaatattgcaggctgataaccaatcctgcccagaaggcgctaaagcccatcacatcatggacatagcccggtaatacagcgagcggcaacccgatggtgaggtagctggcgaagttaaacatgactatagagacaatgcgcaaattcaggcgcaatccgtttagcgcgggttcggctacgggttcgggcatgaggatcaccacatttttacaacagtgtttcatttttaccacgtgctgacgtgaaaatcagcagtaagaatcagaatattgctggcgtgactcccgctacacttaatacaaaaagtcacaaggaagccccaatggaaacccctcaacccgataaaacgggcatgcacattctgctcaagctggccagcctggtagtgatcctcgcgggcattcacgcagcggcagatatcattgtgcagctgttactggcgctgttttttgccatcgtcctcaacccgctcgtcacctggtttattcgtcggggagtacaacgccccgttgccattacgattgtagtggtggtgatgctgatcgcactaaccgcgctggtcggcgtactggcggcaagctttaacgaatttatctctatgctgccgaagtttaataaggagctgacgcgcaaactttttaaattgcaggagatgttgccttttcttaatttgcatatgagcccggagcgaatgctgcagcggatggacagcgaaaaagtggttaccttcaccacagcgctaatgaccgggctttccggggcaatggcgagcgtgcttttgctggtgatgaccgtagtttttatgctgtttgaagtgcgccacgtcccttacaaaatgcgttttgcgctgaataatccacagattcacatcgcgggattacaccgcgcacttaaaggcgttagccactatcttgcattgaagacgctactcagtttatggacaggtgtcatcgtctggctggggctggagctgatgggggtgcagtttgcgctgatgtgggcagtactggcgtttttgctcaactacgtgcccaatatcggcgcggtaatttccgccgtaccgccaatgattcaggtgctgctgtttaatggtgtttacgaatgtattctggtcggcgcattgtttttagtggtccatatggtcatcggcaatattttagaaccacggatgatgggccatcgcctggggatgtccaccatggtggtatttcttagtttgttaatttggggatggctgctcggcccggtagggatgctacttagcgtgccattaaccagcgtgtgtaaaatctggatggaaaccaccaaaggcggtagcaaactggcgattttactggggccgggcagaccgaaaagtcggttaccgggatgaggcgacaagtgatacgatacgcactttcattttccattaaacgttggccctgatatgtatcggatagttctggggaaagttagcaccttaagcgcagctccactgccaccgggtttacgcgagcaagcaccgcaaggtccacgacgcgaacgctggctggcggggcgtgcattgcttagccacacgctttccccgctaccggagatcatctatggcgaacaaggcaaacctgcatttgcgccggaaatgccgctatggttcaacttaagccatagcggtgacgatatcgccctgctgttgagtgatgaaggcgaagtcggctgcgatatcgaagtgattcgcccgcgcgccaactggcgctggctggcgaacgccgtattcagcctcggggaacacgctgagatggacgccgtgcatcctgatcagcaactggaaatgttctggcgcatctggacgcgcaaagaagccatcgttaaacagcgtggcggcagcgcctggcaaatcgtcagcgtagacagcacctatcactccagcctgagtgtcagccattgtcagcttgaaaatttaagccttgcgatctgcacccctactccctttacgctcaccgccgacagtgtgcaatggatcgatagtgttaactgatccgcccacccgactgcccatctattgatccagaacaggtaatcagtatgacgaatacttaaaatcgtcatacttatttccgccatctattttaatccattggggttaccatgctctccacactccgccgcactctatttgcgctgctggcttgtgcgtcttttatcgtccatgccgctgcaccagatgaaatcaccaccgcctggccggtgaatgtcgggccactaaacccgcacctttacacgcctaaccagatgttcgcccagagcatggtttatgaaccattggtgaaatatcaggcagacggtagcgtgatcccgtggctggcaaaaagctggactcatagtgaagatggtaaaacctggaccttcaccctgcgtgatgacgtgaaattctccaacggtgaaccgttcgatgccgaggcggcggcagaaaacttccgcgcagtgctcgataaccgtcaacgtcacgcctggctggagctggcaaaccagattgttgatgttaaagcactcagtaaaacagagctgcaaattaccctgaaaagcgcctactatcctttcctgcaagaactggccctgccccgtcctttccgttttatcgctcccagccagtttaaaaaccatgaaaccatgaacggaattaaagcgccgattggcaccggaccgtggattttgcaggaaagcaaactgaatcagtacgatgtcttcgtccgtaacgaaaactactggggcgaaaagccagcgattaaaaagatcacctttaacgtcatcccggacccgactacccgcgcggtggcgtttgaaactggcgatatcgacctgctgtacggaaacgaagggttattaccgctcgataccttcgcccgctttagccagaatccggcttaccacacccaactgagtcagccgatcgaaaccgtgatgctggcgctcaataccgccaaagcccccaccaacgagctggcagtacgtgaagctcttaattacgcggtaaacaaaaaaagcctgattgataacgcgttgtatggcacccagcaggtcgccgacaccctgtttgccccttctgtgccctacgccaacctcggcctgaaaccgagccagtacgatccgcaaaaagcgaaagcgttgctggaaaaagccggttggacgctgcctgcgggcaaagacatccgcgagaaaaatggtcagccgctgcgcattgaacttagcttcatcggcaccgatgcgttaagcaaaagcatggcggaaatcattcaggctgatatgcgccagattggcgcagatgtcagcctgattggcgaagaagagagcagtatctatgctcgtcagcgcgacggtcgttttggcatgattttccaccgcacctggggcgcgccatatgatccacacgccttcctcagtagtatgcgcgtaccgagtcacgctgacttccaggcacagcaaggattagccgacaaaccgctgattgataaagagatcggcgaagtgctggcgacccatgacgaaacgcaacgtcaggcgctgtatcgcgacattctgacccgtctgcatgacgaggcggtttatctgcctatcagttacatcagtatgatggtggtaagtaaaccggagctgggtaacatcccctacgcgccgatcgccaccgaaattccgttcgaacagattaaaccggtgaaaccttaatgttgcgttacgtattacgccgctttctgctgctgatcccgatggtgctcgccgccagcgtgatcatttttctgatgctgcgcctcggtaccggcgacccggcgctcgattatttgcgtctgtctaacctgccgccgacgccggagatgctggcctctacccgcaccatgctgggactggatcagccgctgtacgtccagtacggcacctggttgtggaaggcgctgcatcttgactttggtatcagtttcgccagccaacgcccggtactggacgatatgctgaacttcctgcccgccacgctggaacttgcaggtgcggcgctggtattaattctgctcacttccgtaccgctcggtatctgggcggcgcgccatcgcgaccgtctgccggatttcgccgtacgtttcatcgcgtttcttggcgtgagcatgcctaacttctggctggcgtttttactggtgatggcgtttagcgtgtatctgcaatggctacccgcgatgggttacggcggctggcagcacatcattttgcctgcggtttccattgcctttatgagcctggcgattaacgcgcgtttactgcgcgccagtatgctggacgtcgccggtcagcgtcacgtcacctgggcgcgtctgcgcggcctgaacgacaaacagaccgaacgtcgccacatcctgcgcaatgccagcctgccgatgatcaccgccgtggggatgcatatcggcgaactgattggcgggacgatgattatcgaaaacatctttgcctggccgggcgtcgggcgctatgcggtgagcgcgatttttaaccgtgactatccggtgatccagtgctttacgctgatgatggtggtggtttttgtggtctgtaatttgattgtcgatttgctcaacgccgcgctggacccgcgcattcgtcgtcatgaaggagcgcacgcgtgaactttttcctctcttcccgctggagcgtacgcctggcgctgatcattatcgccctgctggcgctgattgcgctcaccagccagtggtggctgccgtatgacccacaggcgattgatttgccgagccgcctgcttagcccggatgcgcagcactggctgggcaccgatcacttaggtcgcgatattttcagccggctgatggcagcgacccgcgtgagcctcggtagcgtaatggcctgcctgctgctggtgctgacattagggctggttattggcggcagcgccgggttgattggcgggcgcgttgatcaggccaccatgcgcgtcgccgatatgtttatgaccttcccgaccagcattctgagcttctttatggttggcgtgctcggcaccgggctgaccaacgtaattatcgccatcgccctgagccactgggcgtggtatgcacgcatggtgcgcagcctggtgattagtctacgccaacgcgagtttgtgctggcgagtcggctttccggtgcgggccatgtgcgggtgtttgtcgatcatctggcaggcgcggtgatccctagcctgctggtgctggcaacgctggatatcggccatatgatgctgcacgtcgcggggatgtctttccttggcctcggtgtgaccgcgccgaccgccgaatggggcgtgatgattaacgacgcgcgccagtatatctggacccagccgctgcaaatgttctggccggggctggcgctgtttatcagcgtgatggcctttaacctggtgggtgacgcactgcgcgatcatctggaccctcatctggtgacggagcacgcacactaatgccgcaacagattgaactacgtaatatcgcgctacaggccgcgcagccgctggtacacggtgtaagcttaaccctgcaacgcgggcgcgtgctggcgttagtcggcggtagcggcagcgggaaaagtttaacctgcgccgcaacgctgggcattttgcccgctggcgttcgccagacggcgggggaaattttagccgatggcaaaccggttagcccttgcgccctgcgcggcatcaaaattgccaccatcatgcagaacccgcgcagcgcctttaatccactgcacaccatgcacacccacgcgcgggaaacctgcctggcgttagggaaacccgccgatgacgctacgcttaccgctgccatagaagcggtggggctggaaaacgccgcgcgcgtgctgaagctgtacccgttcgagatgagcggcggcatgttgcagcgcatgatgattgcgatggcggtgctgtgtgaaagtccgtttatcatcgccgatgaaccgaccaccgaccttgacgtggtagcacaggcgcgcatcctcgatctgctggaaagcattatgcaaaaacaagcgccgggaatgctgctggtgacccatgatatgggcgttgtggcgcgtctggcggatgacgtggcggtgatgtctgacggtaagattgtcgaacagggcgatgtagaaacgctgtttaacgcccccaaacatacagtgacgcgcagcctggtttccgctcatctcgccctctacggtatggagctggcaagttgacctaatacggtatggagctggcatcatgactttacttaacatctccggcctttcccatcactatgcgcacggtggatttaacggaaaacatcaacatcaggcggtgctgaataacgtttccctgaccctgaaaagcggcgaaaccgtcgccctgctggggcgcagcggctgcgggaaaagtaccctcgcgcggttgctggtgggtttagaaagccccgcgcaggggaatattagctggcgtggcgaaccgctggcgaaactcaatcgcgcccagcgtaaagcgttccgccgcgatattcagatggtatttcaggactccatcagcgccgtgaatccgcgcaaaaccgtgcgcgagatcctgcgtgaaccgatgcgccacctgctaagtctgaaaaaatccgaacaactggcgcgcgccagcgaaatgctgaaggcggtcgatctcgatgacagcgttctcgacaaacgcccaccgcagttaagcggcggccagctccagcgcgtctgcctggctcgcgcgctggcggtcgaaccgaaactactgattctggatgaagccgtttctaaccttgatctcgtgttacaggcgggtgtcattcgcctgctgaaaaagctacaacaacagtttggcaccgcctgcctgttcatcacccacgacttacgcctggtagaacgcttttgccagcgggtaatggttatggacaacggacaaatcgtcgaaacccaggtggtgggagagaaattaaccttttcctctgacgccggacgtgtgctacaaaacgcggtattacccgcattccccgtgcgccgtcgcaccacagaaaaggtttaacgcaaatgcaacgagtcaccatcacgcttgatgacgatttactggagacgctggacagcctgagccagcgtcgtggttataacaaccgttccgaagctatccgcgacattctgcgtagcgccctggcgcaagaggccacccagcagcacggcacgcaaggtttcgcggtgctgagctatgtgtatgaacacgaaaaacgcgacttagccagccgcattgtctccacccagcatcatcaccacgacctctccgtcgccacgctgcatgtgcacatcaaccacgacgactgtctggaaatcgccgtgttgaaaggtgacatgggtgacgtgcagcattttgccgatgacgttatcgcccagcgcggcgtgcggcacgggcatttgcagtgcttgccgaaggaagattgagttacgccattgtcccaatcgtcttcctgaatcgcagcagcgcaatggtgaaaaatgcgccgccaattgccatcagcgtcagaaactgcggccagacgatttcgaatccggcaccccggtagaggatggcctgcgcgaggctaacaaagtgtgtcgtcggcatggtcagcataatgtcctgcaccatctgcggcatactttcgcgcggcgtggaaccaccggaaagcatttgcagcggcagcagcaccagaatcaccagcagccccagttgcggcatactacgcgctatcgtccccataaaaatgccgatactcgtggtggcaaacagactgagcgccacgcccagcataaacagcgggatgctgccttcaatcggtacgcccagtacacctttcaccatcagcaccaggcttaatccgcttaccaccagcaccaccagccccatgctccagatcttcgccatcatgatctcaaacggcgttatcggcatcaccagtaagtgttccaccgtgccgtgttcacgctcgcggatcagcgcgcttccggtcaatacaatcgccagcatggtaatgttgttgatgatcgccatcaccccgccaaaccacgcgggatcgaggttcgggttaaagcgcatccgggtttccaggcttaccaacggttcgctgttatcacggtagcgcgcgacaaagctgttcacttcaccgttgataatattctggatatacccattgccggtaaatgcctggctcatgcgcgtggcatcgacgttcacctgaatatccggctggcgtccggcgaggacatcacgctgaaaattaggcggaatatttatcgcgaaggtatagcgtccggcgtccagtccggcatccatctcatcggcggtgatcatctccggtggcaaaaaccacggacgatagaagctgttaacgatccggttgcttaactggctttgatccatatcggcaatggcgatcggcgcgaggttcaagcttcctggcgtaacggtcgcactgctatacacgctcaccgtaaagctgaagacaatcagcgtcagcatcgctttatcaccgagcagactgcgcaactctttgatacccagattaaaaatattgcgtaaatggcgcatcatccctcctgttttttcagcagcaggatacttaagcccatcaccagcgggatggctatcagtaacgggataaaaagttgccacaaatcagtcagatccagcgctttgctgaacgtcccgcgggcgatagtcagaaaatgactggtcgggtaaacctcgccgatccaacgtccaggcccttccaggctagctaccggatcgatcatcccggaaaactgtgtcgccgggatcaacgtgataatcgccgttccgaaaatggcggcaatctggcttttcataaaggtggagatcagcagccccattccggtggcaatgatgatatacagcagcgccgccagggtgagcgtcaggaaactgcctttatgcggtacgccaaacacaaacacgctcaggccgcagagcaggaaaaagttcagcatccccagcgcgatgtatggcaactgtttaccaagcaaaaattcactacgcgtggtgggggtcacgtaaaggttgataatgctcccaagctctttttcccgcaccacgctaagggcgcttagcatactcgggatcatcatcagcagaagcgggatcaccgccggaacaatcgctggcaggctttttacgtccgggttatagcgatagcgcgtctcaatattcatcagcccgctttggctggcgggtgtgctttgtcggctcgccacatcctgtaaccagctctggtgcatggcctgcacgtaaccttttaccgtttcagcacggctcggcatcgctccgtcgatccagacgccgagttccacaggcgtaccacgcgcgatatcgcgcccgaaattgggcgggatctcaatcgccaccgtgatatcgcccgcacgcatccgacgatcaagctcgtcataactggtgagcggcggctgttcgataaagtaacgggaaccggagaggttgagtgtccacgcctggctactgacggtctggtcgcggtcgagcaccgcaaagcgcaggttttccacatccatactgatgccgtaacccattatcagcatcaggatcaccgttcccatcagcgccagcgtgctacgtactggatcgcgtcgcagttccagcgcttcgcggcggctgtagctaaacagacggcgcaggctaaatccctgacgcggcgcgtgggtggtgtcgtgtaccacgggcggcgcttcggcttcgttgctctgccctgccgcttcctgcaaataggcgataaatgcctcttccagactggcggctccgcgtttctcaaccagttcctgcggtgtaccgctggcaagcacttttccggcgtgcatcagactgatgcggtcgcaacgttccgcttcgttcataaagtgggtggagatgaagatagtcactttgtcctggcggctgagatcgaccatcaactgccagaacatatccctcgccaccggatcgacaccagaagtaggctcatcgaggattaacatctccgggcgatgaatcaccgccaccgccaggctaagccgctggcgaatgccgagcggcaaactctccggcagaatatcttcaacgtcgttgagcttaaaacgctcgctcatttcagccactcttgcgggaatttccgcttccgggatgtgaaacaaacgggcatgtaactcaaggttttgccgcacggtgagttcgttatagaggctaaacgcctggctcatatagcccacccgacggcgggtatcgatatcttttggatcaaccggttgcccgaacagccacgcctcaccttcgctggcgggcagcagtccggtgagcattttcatggtggtggatttaccgcagccgttgctaccaagaaaaccaaaaatctccccgcgtggaatgcggaaattaacgtgatcaacggcaacgaaggaaccaaaacgcatggtcagatcgcgcgcttcgatggcaatctctgcgttttcaggttgatacggtgggatcactaccgcctgatgcgcctggcgttgcgcttgcggtaacagatttataaatgcttcttccagcgtagcgctttgcgtttgctgccgtagctcttcggcgctgccagttgccagcacttctccggcattcatcgctaccagccagtcgaagcgttcggcctcttccatataggcggtggcgaccagcacgctcatattgctctgccgctggcgaatactgtcgatcagatcccagaactgggagcgggagagcgggtcaacccccgttgttggctcatcaaggatcaacagttccgggtcgtggattaacgcgcagcacagcccaagtttttgcttcatcccgccggagagtttccctgccggacgatcgcgaaacggtgctaacccggtgctggtcagcagctcattgattcgcacttcccgctccgctttgtcgtgaccgaacaggcgagcgaaaaaatcgacgttttcatacacgctcaaggtgtggtagaggtttttgcccagcccctgcggcatccaggcgatgcgcgggcagacgtcgcggcgatgcttcgggtcgcgcatatcgccgcccagcaccatcacattgccctgttcaatgacgcgggcaccggaaatcaagctcaacaagctgctcttcccgacgccgtccgggccaatcagcccgaccatacagcgggccggaatatcgagagtgatattgttcagcgcaacggtttttccataatgctggctcacgcccgccagttgcgcgacaggcgggacgggaaccagttccagatgcgtcattgcggcaacctcaccacgaggtcgtcaggccacggaagttcttcattcacccgcacccacgctacgcccggcaaaccggttttgacatattccagatgctgctggagtaattccggtgggatacgcgctttgacgcggaacatcagtttcagccgttcatcgctggtttcgacggtttttggcgtgaactgggcgacactggcgacaaaactgatggttgcaggaatacgcagatctggcgcggcatcgaggatcagccgggcttcaccgcccagtttcagcgtgcccgcctgttcggttggcaggaagaaagtcatatagacgtcgctgagatcgaccatattcagcacccgaccgcctgccgccagcacttcgcctggctcggcaacccgatactgcacgcgtccgtcacgcggggctttcagttcgctgtcatcgatatctgcggcaatgcgccgttcagtggcttgtgccgcttcgacgcgggtttgcgcctgaatgatattggtgcgtgccgcttctatagccgctttagaagcgcttacctgagctttcgcgctttccagcgcagctcgggcgctctcagcggcggcgcgatcgtcatccagctgttgcgcagaaatagcccctcgttgggccagactacgggaacgcgtatgacgttttgctacggagtccagttctgcctggcgttgattaaccaggctctgtgcggcacgagtttcgctttgtcgttgctccagcaaagcctgcgcggcagcaacggcgctttgtgcctctttgatttgcgcgatggcttccagtcgctgttcctgcaacacgcgagtatccatcttcgccagcacttcaccttcgcgaacaaacttgccttctttcaccagaatggtgtcgatacgcccggcaattttgctggcaatatccacttccgtcgcttcaatgcgcccattactgacagcaaagccttccggcacacctgccgggcgcaacagccaccacgccacgatagccgccaccgccagtaacccgacaacccaccacgccagatggcgcttactcttatccataatcgacccgccataatccctgtaagcaaacgacgcgtgttacaactgccgccgaacgacgttcagcggattcttccatccgggataagaaggaaacggcaaatacgaccagcgcgcagagcattgagcgccaacggggaaggcttagtgaaaacgggtagtaatgttgtcatcatcagcattcctggccgtaaatgaaacacgcatactcataagtgtgatctataaaactggctgacaaaacggtatccatcctgttggatagcgtttcacgcctgttcagttgcaggaacagagcattcctttttacgttttatcaacagtctcaaccagatagtaacattaatattcatgttgtctatggttcagagctgtaacattgtgcgccttctaatcaaaggcataagtccatttctgtttttttcatgctggtaagacttccagggagtggttatctcaggccctgcaccagggttaatttggcaattatgcatgctgaacattcttccagcatgtttactgtcacgggcgttaagacctaaaactgtccccgtttcgcctatgcgttctcttccaccatttccgttatgtgcaacaacttgatttatacctaacatttgactacatgctaatagtgcttcaagtttaggtctgtaatctgtgctaacagaaaaataacgattaaaggatcgacaagagatagcccggctagttttaaactttttgccattaattatagcatgatgctttttattgataattgccgctaattcgaccggatcgagagcattggtcatttcatcaatagagactgttatcggtcctataatgtaacgttttcgctgatcatcaaaagttatcccatgatgatttgccattattttgtatttggggtcatagaaacatacaggataatcttttatcccagagtaggtatcctcatcgagtggtttcatacgcgtgaagttctgcatatagttaccattgcaattcgtttcatgatttccagctaatacatgaacattttcattgatactcattatgcgttttaacaaatcgatgataaattgatcaccacagatattgctaaatcgatcgccggtttggtcgcccagaaacgtacatggcgtcacagcgtctttattaataactaaataaggctgaagactttctaaaataatgtctcttctgttcaggatactgattattgtattaacattagtgttaagttgctcattaaagttctcccttagcaatacgttgagaacttcatcttctatattaagcaactggctaaggaaattttctccttcagccatgattcccaaatgtcccgttgcgaaaagcgcgaacaaaactgcaccgacactgccatcggtatcaccaaaataggttggtctggtacttgtgggatcaacgggtaaacaattggagaaatagattctgtcagcgaactggggttttatcattgtttcgaatttaatatcagatacattatattggcttattttccagttccagatgggtttgtagctctcagtaactgcaacatcattagcattatcatttactgtcatattattaagtaaataaacaatactgcaccaattaatatcggtattatcaagagagcaaccgtaatttttgctattaattgtcacaataaactgataattattattcctacgtagaatatgagcacgcatgccgcttagcatactatatttttcactatgatccgtttgtatggtaaaactaattttgtcatcttgaatagattgttggaaccgttctatttgccaatcatctattttttccacaacctcaccgagcattgtcctggcaatactacttatatcatcacctataccatttgcaatatacccaaacagttctttagtgaagttggtaacatgctcttgcaccatatcatttgttgcgattgtcgttgtactgtcgttagtgcctgccacagttccaattttcatattttacctcatattatttaccgcgaggaatacatagttaacattttatcttatgacatacacctcatgttcgatgggaaaataattatattttgcacaaatcattcagcctcaaagcataatatgaaatttcttatctcatagcagagaaagtccctaaagattgtagaggcgtcatcagaacatgcctctacaatcgattaagaaaacctatgaaatactggcaggattaaaaagacataccaccgtattcatggagttttaatgtagttgaaaacaactaagcccactggaataaattattttattatttttatcacgtgcttccttcagggaatttagccccataataccattatcaaattgttgattatgatctaccccgggcccatgatgcccatatttttgtctaatgtatttgctggggtcttcacctttgagtgtctccccacatatgaagatacgttcacgtgctggtctgaaatcagtagtgttatcaaaataattagcatatacaggtgtgggtttcaaagtattgcttcggattagatggaatagaggatcatccatgtgttctttatgttttttattaaaaatattggctaattcctcaggatcagtaggatttttcatctgattaaatggaacctgcaaagcacgctgacaataacatttttttcttcatctcttattattccgtgatgactggttaaaacttgcctttcactgtcataattacaaacatcgagcgttttaattaagttatacgtatcaccggcagagagtttatgatttgctagtcgtgcagtatagttaccattaaaattgatttcatgatttccagccagaacgacgacatttttattaatacggctatctttattaccctccatatttcgcatagaatttagcaaagtaaggatatatttatcaccaaaaatagtactaaatctatcgcctgtatgatccccaaggaagatacaaggggttatcgcatcgtcctttaaaaaaacatgttgatgcaactcattcaagatcatgtctctcgtatttaataaatcgtagagcactttattatttttatgtttgtatgcagaactagccatctcttcgtgttttaataattcacataataaactccaacccttttccctgatgcctatatgcccactaacgagcaatgcataaagtacagcgcctactcttccatctgtatcgccaaaataagccgtgttggcattttgtgggttaatcacaccacactgtttatagaagtctattttactaaacacagatttaacatagctatcaaacttttccttagtaaacgtctctttagagacatcccaacgccagtcaggtttgaaattaccactaagaagagtaaagaaatttctcgctatgatagaaagcccatcaactttataaattatatcacttttatctccagaggaattaataaaataataaccgcccttacactcaacagtaacggtaatgggagagcttaattttaacacatggttattgtctggtataattgtaaagataaacgtatcagtagtattgtcggcgaatctattatattcttgaatatctatagaaggttcactattataaaaccatactttctccatctggtgactacgatcatttaccttccagtgaccatgttgcaggaaatagatgatatgcaggccaaaatcgttatctatttggctatcattatccagtttatcaaattcaactatctttgcacgatgtgttttatcaaccttgccatggtgttgatgactgttaactttatcactatgcttatcttgatggctactagagatgtttctaatctgattgtcaattgctttcataaataacctgtgatatttttgaattgtttgtaacaaaataaatgatacttgtctgaaaaacagatttacgacgatataaaataataatacttatatgttcgctgattttaagcaccgagactatccggtcttttaccaaataatgaagaataatccctccctggaagataattgtaaaaaacaacagcataagaattaatcttaggataaatttttatttatcatggccttttgaacgctgaaaagtagcgctctgcaaagtaaaccccgctatagttatgctatgcatttgtctttaatgatatctcgtcattatattaacaggatgaaattatcattaatgcatatttcaatattagcagggatacctgaggagtttaaagtgaacatatatatcgggtggcttttcaaattaatccctttgattatgggcttaatttgtatcgcgttaggtggctttgtgctggaaagtagtgggcaaagcgagtatttcgtcgcgggtcatgtgctgatttctctggcggccatatgcctggcattattcactaccgcatttattatcattagccagctcacgcgcggcgttaatacgttttacaatacattgttccccattattggctatgcggggagtattatcaccatgatatggggttgggcactgttagcaggcaatgatgtgatggcagacgagtttgtcgccggccatgttattttcggcgttggtatgattgccgcctgtgtaagcacggtggcagcgagttccggtcactttctgctcattcccaaaaatgcagcggggagcaagagcgacggaacaccggtacaggcttattctagtttaatcggtaactgcctcattgccgttcccgttttactcaccctgctcggtttcatttggtctattacgctgttacgtagtgctgacataactccgcattatgtcgcgggtcacgtattgcttgggttaaccgcaatctgtgcctgtctaattggccttgttgccacaattgtccatcaaacacgtaatacgtttagtactaaagaacactggctgtggtgttattgggttatttttctcggcagtatcacggtactgcaggggatatacgtcttagtcagttccgatgcaagcgcccgactggctcccggcattattcttatttgcctcggaatgatctgttacagcatattcagtaaagtctggctactggcactggtatggagacgtacctgtagcttagccaacagaataccgatgattcccgtcttcacctgcctgttttgccttttcctggcaagctttcttgcggaaatggcgcagaccgacatgggatattttattcctagccgagttctggtcggtttgggagcggtatgctttacgttgttcagtatcgttagtatattagaagcgggttctgctaaaaaataattgcaacgtaccggataaaaccagcgttgaccatttgcgtaacgctggtttttcttaggcatcatgaaataacgcagcattaatgcatagtggttaagtataaaaaacagcaaagttactgtttttttcaacctgttcatatttcataaagatctggccactgagtgagttttcaatcacctttccatccaccttatattaagcatggagggtttcagttcacgggctcattagaaaataatcacaagataaccactatcaaaattagctcatttttaatgcgactctaataattttcatctttaggaaataggtcaggagctctttgctgcaatcaaatcctgcgcacaagcccacgcactgctccacgcccactggaagttatagccccccagccagccggtgacgtccatcacttcgccgatgaagtacagcccaggcactttgcgcgcttccatcgtccgactagagagttcgttggtgtccacgccgccgagcgtcacttcggcagtgcgatagccttcagtgccgttgggttgtacgcgccagtcggtcaatgtgctaatcagtgcctgttggtcacgcacgttgagctgttttaggctaacatccgggatttgcccgagttgctgtaagcgttcaaccaaccgcttcggtagatgaaccgccagtgtgtttttcaggctttgattcggatgtgcgttacgctgctcattcaggaaggtttcgaggtccacatccggtagcagattgatgctgacaaattcccccggttgccagtagctactaatctgcaacaccgccggtccagacaagccgcggtgggtgaagagtaagttctcacggaaaacggtgccgttttcagcggtaatcacggaaggcaccgccacgcccgccagcacctgtaactcttcgagcaacggtttatgcagagtgaatggcaccagacccgcgcgggtcggcagcacgttgaggccaaattgttcggcaatcttataaccaaacgggctcgcgcccagccccggcatactcagcccaccagtcgcgatgaccagcttttcgcaaccgacagtcatgccgttcagatcaagcgtgaagcctgtttcatccttcgccacactcagcacttcgctacgcaatctgaaggtcacattgcccttctcgcactcatccaccagcatgtcgacaatctgctgcgcggagtcatcgcagaagagttgccctaacgttttctcgtgccaggcgatgccgtgtttattgaccagatcaatgaaatcccactgggtaaaacgtgcgagtgcagacttacaaaaatgcggattctggctcagataagcgcctggttcgacataaaggttggtaaagttgcagcgcccaccgccagacataaggattttgcgccctggttttttaccattatcgatcagcagaacccggcgtcctgcctgacctgccagcgcagaacagaacatacccgccgcaccagcgcctataataatggcatcaaacctttccacgttgcgctcctcttagaaaaaacgggcgtgaattgtaaagattcctcagtggtcgcaccagcatcaatattactaaaaggaagtatttgcctgaattatataagataattattttttgagtgaaatccatacagggggcaaatcaaaaaaagtctatatttcactttgcccgcgccgcgaaagtcactgataatgcgccgcgttcatgtcctcaaaatggcgtaacgtcctatgctacatttgtttgctggcctggatttgcataccgggctgttattattgcttgcactggcttttgtgctgttctacgaagccatcaatggtttccatgacacagccaacgccgtggcaaccgttatctatacccgcgcgatgcgttctcagctcgccgtggttatggcggcggtattcaactttttgggtgttttgctgggtggtctgagtgttgcctatgccattgtgcatatgctgccgacggatctgctgcttaatatgggaagctctcatggccttgccatggtgttctctatgttgctggcggcgattatctggaacctgggtacctggtactttggtttacctgcatccagctctcatacgctgattggcgcgatcatcgggattggtttaaccaatgcgttgatgaccgggacgagtgtggtggatgcactcaatatcccgaaagtattaagtattttcggttctctgatcgtttcccctattgtcggcctggtgtttgctggcggtctgattttcttgctgcgtcgctactggagcggcaccaagaaacgcgcccgtatccacctgaccccagcggagcgtgaaaagaaagacggcaagaaaaagccgccgttctggacgcgtattgcgctgatcctttccgctatcggcgtggcgtttagccacggcgcgaacgatggtcagaaaggcattggtctggttatgttggtattgattggcgtcgcgccagcaggcttcgtggtgaacatgaatgccactggctacgaaatcacccgtacccgtgatgccatcaacaacgtcgaagcttactttgagcagcatcctgcgctgctcaaacaggctaccggtgctgatcagttagtaccggctccggaagctggcgcaacgcaacctgcggagttccactgccatccgagcaataccattaacgcgctcaaccgcctgaaaggtatgttgaccaccgatgtggaaagctacgacaagctgagccttgatcaacgtagccagatgcgccgcattatgctgtgcgtttctgacactatcgacaaagtggtgaagatgcctggcgtgagtgctgacgatcagcgcctgttgaagaaactgaagtccgacatgcttagcaccatcgagtatgcaccggtgtggatcatcatggcggtcgcgctggcgttaggtatcggtacgatgattggctggcgccgtgtggcaacgactatcggtgagaaaatcggtaagaaaggcatgacctacgctcaggggatgtctgcccagatgacggcggcagtgtctatcggcctggcgagttataccgggatgccggtttccactactcacgtactctcctcttctgtcgcggggacgatggtggtagatggtggcggcttacagcgtaaaaccgtgaccagcattctgatggcctgggtgtttacccttccggctgcggtactgctttccggcgggctgtactggctctccttgcagttcctgtaatcgtacgcaccaaaacgagcgggtcagctggcccgcttcagattgtgacatagtgcgctttgttcatgccggatgcggcgtgaacgccttatccggcctacaaaaacatgcaaattcaatagattgcagagattatgtaggcctgataagcgtagcgcatcaggcaattttgcgtttgtaatcagtctcgagcgggtcagtttactggcccgctttttttatgcgttattattgctgaagtgcttaatgccaaatcatcaatgcaatcaggctgaccaccaccagaccacacaatgcgctggtcagaataaactgccgacgcacccgctcacagcggcgaataaattcatcatcgtgatgatcgcgataacgttgggcatagatataccaaacgagacgcacctgtttgttgggttggccatgattggtaaaaaagccccctccatcaacatattgatagagcaatggatcgcagttacgcagtaccactaacaacgcgcgtagactactgaaatagcgcgccatgttaacaatgcaaacgacacataaagcccaaaataatgcgacggtgcttatcatacctcctccccggcgacctgcccgcggagttccaccccggggctaccgctcccgatacgctgccaatcagttaacaccaggtcctggagaaaccgcttttgtggtgaccaacatacgagcggctctatagatagtgtaggagatcaggttgttttttttccagaaggttaaccactatcaatatattcatgtcgaaaatttgtttatctaacgagtaagcaaggcggattgacggatcatccgggtcgctataaggtaaggatggtcttaacactgaatctttacggctgggttagccccgcgcacgtagttcgcaggacgcgggtgacgtaacggcacaagaaacgctagctggccagtcatcgacaactttatggaaggagtaacactatggcttataaacacattctcatcgcggtcgacctctccccggaaagcaaagttctggtagagaaagcagtctctatggctcgcccctacaatgcgaaagtttctctgatccacgtagatgtaaactactctgacctatacaccgggcttattgatgtgaatctgggtgatatgcagaaacgcatctctgaagagacacatcatgcactgaccgagctttccactaatgcaggctacccaatcactgaaaccctgagcggcagcggcgacctgggccaggttctggtcgatgcaatcaagaaatacgatatggatttggtggtttgtggtcaccaccaggacttctggagcaaactgatgtcttccgcacgtcagctgatcaacaccgttcacgttgatatgctgattgttccgctgcgcgacgaagaagaataatcttccctctacgacgtgttcctgaacgcccgcatatgcgggcgttttgctttttggcgcgccttgttacctgatcagcgtaaacaccttatctggcctacggtctgcgtacgcaatcaaaatccccagccaatacaacatttaacaccatcatattttccatcattagtgtgatcatctggttattttctgttgtaatagtgtattaatctattcaccgcatcaatattaagaatctctgacagatgtaaactttttcgcgcgttatcccttacgcgttcatacttttcaggatggtattggaaggttaataaatatgaatacaacaacacccatggggatgctgcagcaacctcgcccatttttcatgatcttttttgtcgagttatgggagcgattcggctactacggcgtgcagggcgtactggcggttttcttcgttaaacagcttggattcagccaagagcaggcttttgtcacttttggtgcttttgctgcgctggtctatggcctcatttccattggcggctatgtcggcgaccacctgctggggaccaaacgcaccattgttcttggagcacttgtgctggcgattggctacttcatgaccggcatgagcctacttaagcctgacctgattttcatcgccctggggactatcgctgtcggtaacggcctgtttaaagctaacccagccagcttgcttagcaagtgctatccgccgaaagatccgcggcttgatggcgcattcaccctgttctatatgagcatcaacatcggcagcttgatagcgttaagcctggcccctgtgatcgctgatagattcggttatagtgtcacctacaacctgtgcggggcggggttaattatcgcattactggtttacatcgcctgtcgtggaatggtgaaagacattggttctgaacccgacttccggccaatgagcttcagcaaactgttgtacgtgttacttggcagcgtggtgatgatcttcgtatgcgcatggctgatgcacaacgtagaagtcgccaatctggtgctgattgttctctccatcgtcgtcaccatcatcttctttcgtcaggcattcaagctggataaaaccgggcgcaataaaatgtttgtcgcctttgtcctgatgctcgaagcggtggtgttttacattctctacgcccagatgccaacaagcctgaacttctttgccatcaacaacgtgcatcatgaaattctcggtttttccatcaacccggtcagcttccaggcgcttaacccgttctgggtggtactcgccagcccaatactggcaggcatttacacgcatctgggtaacaaaggcaaagacctcagcatgccgatgaaatttactctcggcatgtttatgtgcagtctgggctttttgacggcggcagctgcgggaatgtggtttgcggatgcacaagggctgacaagcccatggtttatcgtgctggtgtacttattccagagcttaggtgaactgtttattagcgcccttggcctggcgatgattgctgccctggtgccgcagcatttgatgggctttattctcgggatgtggttcctgacgcaggctgccgcgttcttgctgggcggctatgtggcaacatttaccgcggtgccggacaacattaccgatccgcttgagacgttgcccgtctataccaacgtgtttggtaagattggtctggtcacgctgggcgttgcagtagtgatgctgttgatggtgccgtggctgaaacgcatgattgcgacgccggaaagccattaattattcttgcagaaagcagggtagcgttatcgctaccctgttttagttttacactggcgtacctgcatagatatcaaagcgatgccctttagtgactaccgcgtttggcgtggcgacattcgccagcggtggcgcgtagtccgggcgctttaccaccacgcgtttggtcgccagcaagcgtgcaggctccagtaatccatcggcatcaagatccggtcccaccaggctctgaaagacacgcatctcttttttcactagcgcgcttttctgcttatgcgggaacatcgggtcgagataaaccacctgcgggcgcggggtaatatcagtcagcgccgtcaggctggaggcgtgaattaactgcaaccgctcctgcaaccagccgccgatttccgcatccgcataaccacgcgccaggccgtcgtcgagtagcgcggcaaccactggattacgctccagcatccgcacgcggcagccgacactagccagtacaaaggcatcgcgcccaagtcctgcagtggcatccaccacatccggcaaataatcgcctttaatgcccaccgctttcgccaccgcctcaccgcgaccaccgccgaatttgcgtcggtgcgccatcgctccgccaacaaaatcaacaaagatgccgccaagttttggctcatcacgcttgcgcaattccagatgttccggcgttaacaccagcgccatcaggttgtcttcatcgtgctccagcccccagcgggccgccagaacagataaggcaccgtctccggtgcctgtttcatcaattaagcagattttcactgaatgatcagcccttaatgccgtaatgctccagcatcgcatccagctgcggttcacgaccacggaagcgtttgaacagatccatcggctcttcactaccgccacggctcagaatgttgtcgaggaagctctgcccggtttcacggttgaaaatgccctcttcctcaaagcggctgaaagcatctgccgccagtacgtcagcccacaggtagctgtagtaacctgcggcataaccaccggcgaaaatatggctgaaagcgtgcgggaaacggccccaggacggagatggcaccacggcaaccagtttcttgatttctgccagagtttcgaggatttttgccccctgatccgggcggaactcggcatgaaggcggaaatcaaacaggccgaactccagctgacgcagaataaacagcgccgcctggtagttcttcgccgccagcattttatccagcaactctttcggcagcggttcgccggtttcatagtgaccagagataaacgccagcgcctccggctcccagcaccagttttccataaactgactcggcagttcgaccgcatcccacggcacaccgctgataccggaaacaccagcggtttcgatgcgggtcagcatatggtgcaggccgtgaccgaactcgtggaagagggtgatcacttcgtcgtgagtgaacagcgccggtttaccatttaccgggcggttgaagttacaagtcaaatacgcgaccggtttttgcaaagaaccatcagctttacgcatctggcctacgcagtcatccatccacgccccgccgcgcttgttttcacgggcatacagatcgaggtagaagctaccgcgcagttcgttattttcgtcatacagttcgaagaaacgtacatccggatgccagacatcaacatctttacgctctttagcggtgatgccgtaaatacgcttaaccacttcaaacaggccgttaaccgctttgttttccgggaagtacggacgcagctgttcgtcactgatgctgtagaggtgctgtttttgtttttcgctgtagtaagcgatatcccacggctgcaactcatcgacgccaaattcggctttggcaaaggcacgcaattgcgccagctctttttcgccttgtggacgcgcgcgttttgccagatcggttaagaaatccagcacctgctgcgggttttctgccattttagtggcaagggatttaaaggcgtagttttcaaagcccagcagttgcgccagttcgtgacgcagcgcgaggatctcttccatcaccttgctgttatcccatttaccggcgtttgggccttgatcggaggcgcgggtgctgtaagcgcgatacatctcttcacgcagagcctggttgtcgcagtaggtcattaccggcaagtagcttgggatatccagcgtcagcaaataaccttccagctctttcgcttcggcctgggcttttgccgcagccagcgcgctttctggcatccccgccagctccgcttcgtcggtaacgagtttggtccagcccattgtcgcatcgaggacgttgttgctgtactggttgcccagttcagaaagacgggtcgcaatttcgccgtaacgctgctgtttctctttcggcagacctatgccagagagttcaaagtcgcgcagtgcgttatcaaccgctttcttctgcgccgtgttcagcgtggcgtaatgatcgccatcgcgcaggtcgcgatacgctttatacagcccttcatgttgccctacccaggtgctgtattcgctcagcagcggcagggtttgttcgtaggcttcacgcagttccgggctatttttcacgctgttcaggtggctgaccggggagaagatacgccccaacacatcgtccacttccgccagcggctggcagagattttcccaggtgtacggtgccccttgcgctactacgcgctccacgttttcgcggcagtcgttcaatgccttagtcacggctggaacgacatgttccgggagaattttagaaaacggaggcaattcaaagggagtcagtaacggattcgtcattcgcgcagtcctggttaaagaggttaaggaagcgctcaacaggcgctttacataatgtgtgtagcatggggttaagtgtagtgaatttcaatgagaaacgttacgctttcgcggcggcggcctcttttcggtatactgtcctgatacgcttttgtgcgccccgaatacgggccgatttttacttaccggaacacctttacccatgctcagttatcgccacagctttcacgctggcaaccacgccgacgtccttaaacataccgttcagagcctgatcatcgagagcctgaaagagaaagataaaccgtttctctatctcgacacccacgcaggggccgggcgttatcagttaggcagcgaacatgccgagcgtaccggcgaatatctcgaaggcatcgcccgtatctggcagcaggacgatttgcccgcagaactggaggcgtacatcaatgtggtaaaacacttcaaccgtagcggtcagttgcgttactaccccggtagcccgttgattgctcgcctgctactgcgtgaacaggacagcctgcaactgaccgaactgcacccgagcgattacccgttgttgcgttctgaatttcagaaagatagccgtgcgcgtgtcgaaaaagccgacggtttccagcagcttaaggccaaactgccgccggtttcccgccgtggtttaatccttatcgacccgccgtatgaaatgaaaactgactatcaagcggtggtcagcgggatagcagaaggttacaaacgtttcgccactggtatttacgcactgtggtatccggtggtgctgcgtcagcaaattaagcgcatgatccacgatctggaagcgaccggtattcgcaaaattctgcaaattgaactggcggtactgccagacagcgatcgccgtggcatgaccgcttccggcatgattgtgattaacccgccgtggaaactggaacaacagatgaataacgtgctgccgtggctgcacagcaaactggttccggcaggcaccgggcacgccaccgtaagctggatcgtgccggagtaattgcagccattgctggcacctattacgtctcgcgctacaatcgcggtaatcaacgataaggacactttgtcatgactaaacactatgattacatcgccatcggcggcggcagcggcggtatcgcctccatcaaccgcgcggctatgtacggccagaaatgtgcgctgattgaagccaaagagctgggcggcacctgcgtaaatgttggctgtgtgccgaaaaaagtgatgtggcacgcggcgcaaatccgtgaagcgatccatatgtacggcccggattatggttttgataccactatcaataaattcaactgggaaacgttgatcgccagccgtaccgcctatatcgaccgtattcatacttcctatgaaaacgtgctcggtaaaaataacgttgatgtaatcaaaggctttgcccgcttcgttgatgccaaaacgctggaggtaaacggcgaaaccatcacggccgatcatattctgatcgccacaggcggtcgtccgagccacccggatattccgggcgtggaatacggtattgattctgatggcttcttcgcccttcctgctttgccagagcgcgtggcggttgttggcgcgggttacatcgccgttgagctggcgggcgtgattaacggcctcggcgcgaaaacgcatctgtttgtgcgtaaacatgcgccgctgcgcagcttcgacccgatgatttccgaaacgctggtcgaagtgatgaacgccgaaggcccgcagctgcacaccaacgccatcccgaaagcggtagtgaaaaataccgatggtagcctgacgctggagctggaagatggtcgcagtgaaacggtggattgcctgatttgggcgattggtcgcgagcctgccaatgacaacatcaacctggaagccgctggcgttaaaactaacgaaaaaggctatatcgtcgtcgataaatatcaaaacaccaatattgaaggtatttacgcggtgggcgataacacgggtgcagtggagctgacaccggtggcagttgcagcgggtcgccgtctctctgaacgcctgtttaataacaagccggatgagcatctggattacagcaacattccgaccgtggtcttcagccatccgccgattggtactgttggtttaacggaaccgcaggcgcgcgagcagtatggcgacgatcaggtgaaagtgtataaatcctctttcaccgcgatgtataccgccgtcaccactcaccgccagccgtgccgcatgaagctggtgtgcgttggaagcgaagagaagattgtcggtattcacggcattggctttggtatggacgaaatgttgcagggcttcgcggtggcgctgaagatgggggcaaccaaaaaagacttcgacaataccgtcgccattcacccaacggcggcagaagagttcgtgacaatgcgttaaatgttaaagggctaagagtagtgtgctcttagcccttaattacgtttccgctatcagttcagaagctgaagcagaaagcggatcagttccagcagcgcaattaacgcccctagaacgatgattgctttatcaatcacccgttttctccatgcgatggagtgagaatgcatccgcttactcatccactgcctgtcacggcgcatgtctcattgttagataagaactctctcactccggccagagcatcagttaacggcaccacccgtacttctgaccaggactttgaaagcgtttatgcgcattgccagagtgaaaatgcctcagagctaactggataatcatacagtacatgcaggttataaaaccagcacgtccttgcaatagtttcagtatggtattagcattgatgcgttagatgatggctatctcactccagtcagagccaccaactcagggctggaaagtaaaaaaccgacgcaaagtcggtttttttacatccggattcggacaaggcttaatatgacgatgacccagtgaaagtatataaatcgtcactgcgatatataccgaagtgctccctccgccagctgaagaaatcgctaattcttgcaatgttagccactggctaatagtattgagctgttagataagaactctctcactccagccagagccaccaactcagggctggaaagtaaaaaaccgacgcaaagtcggtttttttacgtcctgattcagacctcctttcaaatgaatagccaactcaaaattcacacctattaccttcctctgcacttacacattcgttaagtcatatatgtttttgacttatccgcttcgaagagagacactacctgcaacaatcaggagcgcaatatgagttttctgttacccatccaattgttcaaaattcttgctgatgaaacccgtctgggcatcgttttactgctcagcgaactgggagagttatgcgtctgcgatctctgcactgctctcgaccagagccagcccaagatctcccgccacctggcattgctgcgtgaaagcgggctattgctggaccgcaagcaaggtaagtgggttcattaccgcttaagtccgcatattccagcatgggcggcgaaaattattgatgaggcctggcgatgtgaacaggaaaaggttcaggcgattgtccgcaacctggctcgacaaaactgttccggggacagtaagaacatttgcagttaaaaatttagctaaacacatatgaattttcagatgtgttttatccgggaggcattatgttactggcaggcgctatctttgtcctgaccatcgtattggttatctggcagccgaaaggtttaggcatcggctggagtgcaacgctcggcgcagtactggcgttagttacgggcgtggtccatccgggtgatattccggtggtgtggaatatcgtctggaacgcgacggctgcgtttatcgccgtcattatcatcagcctgctgctggatgagtccggcttttttgaatgggcggcgctgcacgtcagtcgctggggtaatggtcgtggtcgcttgctgtttacctggattgtcctgctcggtgctgccgttgccgccctgtttgccaatgatggcgcggcgcttattttgacaccgattgtcatcgccatgctgctggctttagggttcagtaaaggcactacgctggcgttcgtgatggcggccggattcattgccgataccgccagcctgccgcttattgtctccaacctggtgaatatcgtttccgctgatttctttggcctcggctttcgcgaatacgccagcgtgatggtgccggtggatatcgccgcgattgttgccacgctggtgatgttacatctctattttcgcaaagatattccgcagaactacgatatggcgctgctgaaatctcccgcagaagcgatcaaagatcctgctacgttcaaaactggctgggttgttttactgcttctgctggtgggatttttcgtcctggaaccgctcggcattccggtgagcgccattgcagctgtgggcgcgctgatattatttgtcgtcgctaaacgcggtcatgcgattaatacgggtaaagtcctgcgcggtgccccctggcagattgtcatcttcagcctcggcatgtatctggtggtttatggcctgcgcaatgccggattaacggaatatctttctggcgtactcaacgtgctggcggataacggcctgtgggccgcgacgctcggcaccggattcctcaccgccttcctctcttctattatgaacaatatgccgacggtactggttggcgcgttgtccattgatggcagcacggcatctggcgttatcaaagaagcgatggtttatgccaatgtgattggctgcgatttgggaccgaaaattaccccaattggtagcctggctacgctactctggctgcacgtacttagccagaagaatatgactatcagctggggatattacttccgtacagggattatcatgaccctgcctgtgctgtttgtgacgctggctgcgctggcgctacgtctctctttcactttgtaatgagatactgatatgagcaacattaccatttatcacaacccggcctgcggcacgagccgtaatacgctggagatgatccgcaacagcggcacagaaccgactattatccattatctggaaactccgccaacgcgcgatgaactggtcaaactcattgccgatatggggatttccgtacgcgcgctgctgcgtaaaaacgtcgaaccgtatgaggagctgggccttgcggaagataaatttactgacgatcggttaatcgactttatgcttcagcacccgattctgattaatcgcccgattgtggtgacgccgctgggaactcgcctgtgccgccctagtgaagtggtgctggaaattctgccagatgcgcaaaaaggcgcattctccaaggaagatggcgagaaagtggttgatgaagcgggtaagcgcctgaaataaagcggcgatatcccccccacaggttgttagaaaagtgcgctttatttatgtcggatgcgacgctggcgcgtcttatccgacctacaaagttatgaaaattcgatgaatagtatgttatttgtaggcctgacaggcgtagcgcatcaggcgattttgctatttacacagtactccctgcgtgagattccaattatcgcgtccagcatggtgtatcagtgagctgcttagttatcagcgatacagcgcagtagtttaaagacgtactggattatgatttatcagtggtttacacaacaaattattaaataattataagataccttaacccattttattattacacatctaaaacatcacaaaaaaaatcacttcacacactatcagagaacataataactttttaaaatgagcgcattttgatagttgttaacgatttcctttacgatactatcactaccctttttttacacacaaatattaccgggtggagataaaagggaaatcaaaggtaattatatcaggaagatataacgcattacatttattgtgtgtagaagaaaatccattcctgttctaattatccaatttaaacatcttagcataaaacaaatgatgaataaggaattttatattgattattagcactttataatcattgaataaaaatagattttatgtacttttaaaacaatgcactatattatggggtgatggatattcatgtcacgccccaaaattaactgagttcacctaaacagaaaggatataaacatcagacaggtttacgttactatcaggcatatcacctcagaatcagatgaaaactataaagaaatatctattatggttttaatatttgttgataaggatagtaacatgaacatgacaaaaggtgcactcatcctcagccttagttttttgcttgccgcatgtagtagtattccgcaaaatatcaaaggcaataaccaacctgatattcaaaaaagttttgttgctgttcataaccagccggggttatatgttggtcaacaagcgcgctttggtgggaaggttatcaacgttatcaatggcaaaacggatacgttgttagaaatctctgtattaccgttggatagctatgcgaagcctgatattgaagccaactatcagggccgactgctcgccagacaaagcggcttccttgatccagtgaactatcgtaatcactttgttaccatcctcggcaccattcagggtgaacaacctggctttatcaataaagtcccgtataacttcctggaagtgaatatgcagggcatccaggtgtggcatttgagagaagtggttaataccacctataacctgtgggattacggctatggtgcattctggccggaaccgggctggggtgcgccttactacaccaatgcggtgagtcaggtaacacctgagctggtcaaataacaccaccgaaagatgcagatgctttctcagcatctgcatcatgcattacatcaaattaatacacagtaagctaactattattattataagccctgtcctgttaattacctttggcaaactgattataaagttaatgtccgcaccaggagtcggttatgtttcttataattaccagggatacgatgttcttcaccgcgatgaaaaacattctgagtaaaggtaatgtcgttcatatacagaacgaagaagagatcgacgtaatgttgcatcagaatgccttcgtcattattgatacattaatgaataatgtatttcattctaattttctcactcaaattgaacgattaaaacctgtccatgtcattattttctccccctttaatattaaacgctgcctggggaaagtgccggtgacctttgttccgcggactatcactatcattgattttgtcgcactcatcaatggcagttactgctctgtgcctgaagcggctgtgagtcttagccgcaagcaacatcaggttctgagctgcattgcgaatcaaatgacaacggaagatattctggagaaactgaaaataagcctaaaaacgttctactgccataaacacaatatcatgatgatcctcaatcttaagcggatcaatgagctggtacgccatcagcatattgattatctggtgtgaatttcaggcttacggtgagtctggctacgctgccacacagattagctaatactaacgcctttcacccctgccataccttttaataatcgcaacaggtcttctatgctcgttgtggcatgaagctggatatcaatggcgaccacttcatgatcttcattttcctgcaagctaactaaatcagtttttattttttgctgcttaaaccagtcgagcatacttaccgtattaccgttcactaatgtcagctgtaaatggtaatttttgttcatcaggcggaaggttaattgatggaagacttccagcaccaacaaggtcatcacactaccataaatacccagttcgtacataccgctgccaataaccatacctatggcggcggtcacccagatatccgctgccgtcgtcagacctacaatattttggttacgaacgagaatgttacctgcaccgataaacccgacgcccgtcaccacctgagcagcaatacggctggggtcgagtccgacgtgatctaaagacagcacgtcagcaaaaccatatttgctaacaatcataaacagggcgcttcccatgccaattaatacatgtgtgcgtaaccctgctcctttgccgcgcatttgcctttccatgccaatagcgccacaggcaattgccgcgagtataagacgtataataaattctgctgtcatataaaaatgcaaaaaggagcagcaagatggctcaacttgctactcctttttacttgcacctcattaattcggcaagtcattagatgcttgatttttgaaggtatacaaatttttctgcgggtttttcttacagtattcgatcactttaggaatttgagtgagatcggtttcatttaaagtaacggtatcgccacctttatatactgtttcttcatgcagcatccaccatgcaaccggggtcattgcttttggattcagatcaataaattcctggcaggtcatatctttagcggattcattggctgccaacgcagattgtgcgttcaccagactcaaagccgctacagcgcccataaaaataaacgctttacggagagaactaatattcattttgtaacccattcaatatagagattatatatgaacaggaggaatagctgcttttaaagaagatattccggcctgttcaatatgcaaggaagtacgatgtaacgcattcccggaattacatatctttcttaattttgtcccattcgcctttaactttatctttaaagttggcttgtttatcctgagtacaagcctgaacgatagctggggttacggttgcaataccctgaacatctaaaaccgcatcttctggtttatctttgttgttcagcgcttcagcaaaaccaactgcagttggctggaaggattcgtccacagccaggaaatcttcacaggtccaggagttgaccggttttttgttatcagctgctttttgcgcatccgctgcattgctcacaactggcagaagaagcagaccaccaagaataacgcctaatacttttttcatcgtaatatcctcaactataaagtgaaagagccgtcacgaatcaatttcgacactgaggttataacctggttttctgtatatgtcatgttgatggaaaatatcaaaatcagatatttttatttcaatacaatgagttacagatgcatcagatactgcaattaggaaatttttattaaatcgactgcattcttagacgcgtttttggcatagattgatagcaggggattttcttcttaattttatagggtggttctatgttatatatagataaggcaacaattttgaagtttgatctggagatgcttaaaaaacatcgcagagcaatccagtttattgccgtgctgctgtttatcgtcgggttgctgtgtatcagtttcccgttcgtctctggcgatattttaagcacagtagtgggtgcattattaatctgcagcggtattgcgcttattgtcgggttattcagcaaccgcagtcataatttctggccggtattatccggtttcctcgtcgcagtcgcctatttattgatcggctatttcttcatccgcgcaccggagctgggcatttttgccattgcggcatttattgccggtttgttctgtgttgcaggggttattcgcctgatgagttggtatcgtcagcgtagtatgaaaggcagctggctacagctcgttattggtgtgctggatatcgtcattgcctggatattccttggtgcaacgccgatggtgtctgtaacgctggtttccacactggtgggaattgaactgatatttagcgccgccagcctgttcagcttcgccagtttgttcgttaagcagcaataattaccccggttgtcacccggatcatagtcacttgatgtgactatgatccgattaatactctctccgctacgcagtgttgtagatcaattgcgcactatcattgaaataattacctgctagtgattatttcaacctactgaatttcatctaatttttttcactctatggcaaattagccatttcaaacattatcatggctgatattttccgtagtcaggtttaatgttttaaaagtgctgtgggaaagtgaacaaagagttccgtaagcgttgatgctatgggcggttaaataagtaatccgggttcatttttttgcaactggcgttgattacattgcataaatatccgtgtctccagacgctatataaaaacctgaagacatgaatgcgttatttactcaggtaatttcaatgcgttaaaagaaagctggcaatccaattgccagcttaagtcgaaacaaggagactcgatatttaaatcggattacattttaactttagtaatattcttcagagatcacaaactggttattgataacttattcttgggcagtaatccgcaaacgttaactttttgtttgctatttacaagctgataacaaccaggaatcttacttaggatcaatatatggagtgcgtgatggataaatctgaagtattgattagtgttaatagacgtattagttcacgaagggtaaagttcttataggcgtttactatattgaacaacgattcggacaaggatgtaaataatgaaaaggatgacatattcgaaacgataacggctaaggagcaagttatgatttttctcatgacgaaagattcttttcttttacagggcttttggcagttgaaagataatcacgaaatgataaaaatcaattccctgagtgagatcaaaaaagtaggcaataaacccttcaaggttatcattgatacctatcacaatcatatccttgatgaagaagcgattaaatttctggagaaattagatgccgagagaattattgttttggcaccttatcacatcagtaaactaaaagctaaagcgcctatttattttgttagccgcaaagaaagtatcaaaaatcttcttgagattacttatggtaaacacttgccccataagaatagtcaattatgttttagtcataatcagttcaaaattatgcaactgattctgaaaaataaaaatgaaagcaatatcacgagcacgctcaatattagccaacaaacattaaagattcagaaattcaacattatgtacaagctgaaactaagacgtatgagcgacatcgtcaccctgggtatcacatcttatttttaatcaggacataagcaactgaaattgatggctggcatgacgagggatgcagatgctgatttcattacccccggtgattactaaaggagaggctaaaacgactttattcccctggtatgtgtatccaccagtagaacccttcgttgcccgaatgctggcaggaactgttggcagaacggcaacattttttttgtcgttgacctcaccatgtcgatcactgtgcctgtatcccaccttactggctgacaaccccactatgccgctggtctgtaaatccctcatatctctcctcgcgcgcaatttaaagaaccgttatttctcaagaattttcagggactaaaatgaacagaagaagaaagctgttaataccgttgttattctgcggcgcgatgctcaccgcctgcgatgacaaaagcgcggaaaacgccgccgccatgacgcctgaggtcggtgtcgtcacactctcccccggtagcgtcaatgtgttgagcgaattgcccggtagaaccgttccttatgaagttgccgagatacgtccccaggtgggcggtattatcattaaacgcaactttatcgaaggcgataaagtgaaccagggcgatagcctgtatcagattgatcctgcacctttacaggccgagctaaactccgccaaaggcagcctggcgaaagcgctctctaccgccagcaatgcccgcatcacctttaaccgccaggcaagcttgctgaagaccaactacgttagccgtcaggattacgacaccgcgcgcacccagttgaatgaagcagaagccaatgtcaccgtcgccaaagcggctgttgaacaggcgacgatcaatctgcaatacgcgaatgtcaccagcccgattacgggcgtcagcgggaaaagcagcgtgaccgtcggcgcactcgttaccgctaatcaggcagatagcctggttaccgtacaacgtctggacccgatttatgtcgatctcacgcagagcgtgcaagatttcttacgcatgaaagaagaggtcgccagtgggcaaatcaaacaggttcagggcagtacgccagtacagctcaatctggaaaatggtaaacgctacagccagaccggcacgctgaaattctccgacccgacagtggatgaaaccacgggctccgtgacgttacgggcgattttccccaacccaaatggtgacttgctgcctggcatgtacgtcacggcattagtggatgaaggtagccgccagaatgtattactggtgccgcaggaaggcgtcacccacaacgcccagggtaaagcaacggcgctcattctggataaagacgatgtcgtgcagctacgcgaaattgaagccagcaaagccatcggcgaccagtgggtcgtcacctctggcttgcaggctggcgatcgggtgatcgtttccggtttgcaacgcattcgtccgggtatcaaagcacgagcaatttcctccagccaggaaaacgccagcaccgaaagcaaacaataacgttgcaggcttaaggggactttcatggctaactattttattgatcgcccggtttttgcctgggtacttgccattattatgatgcttgcaggtggtctggcgatcatgaacttaccggttgcgcagtatccgcagattgcgccaccgaccattaccgtcagcgctacctatccaggtgccgatgcgcaaacggtagaagacagcgtcactcaggtgattgagcaaaatatgaatgggcttgatggcctgatgtacatgtctagtaccagtgatgcggcgggcaatgcctctatcactctgaccttcgagactgggacatctcctgatatcgcacaggttcaagtgcaaaataaactgcaactcgctatgcctagtttacctgaagcagtgcagcagcaggggattagcgtcgataagagcagcagtaatatcctgatggtagcggcgtttatttctgataacggcagcctcaaccagtacgatatcgcggactatgtagcgtctaatatcaaagacccgctaagccgtaccgcgggcgttggtagcgtacaactctttggttccgagtatgccatgcgtatctggctggacccgcaaaaactcaataaatataacctggtaccttccgatgttatttcccagattaaggtgcaaaacaaccagatttccggtggtcaactgggtggcatgccacaggcggcagaccagcagctaaacgccagcatcattgtgcagacgcgtctgcaaacgccggaagaatttggcaaaatcctgttgaaagttcagcaagatggtagccaagtgctgctgcgtgatgtcgctcgcgtcgaacttggggcggaagattattccaccgtggcacgctataacggcaaacctgctgccgggatcgccatcaaactggctgccggagcaaacgccctggataccagccgggcagtcaaagaggaactgaaccgcttaagtgcctatttcccggcaagtctgaagacggtttatccttacgacaccacgccgtttatcgaaatttctattcaggaagttttcaaaacactggttgaggctatcatcctagtcttcctggtcatgtatctgtttttgcagaatttccgtgccacaatcatcccgacgattgccgtaccggtggttattctcgggacgtttgcgatcttgagcgcggtcggtttcaccatcaacacgttgactatgttcgggatggtgctggcgatagggttactggtggatgacgccatcgtggtggtggagaacgtcgagcgtgtcattgcggaagataagctaccgccgaaggaagcgacgcataaaagcatggggcagatccaacgtgcgctggtcggtattgccgttgttctttccgcagtgtttatgccgatggcctttatgagcggtgcaaccggggagatctaccgccagttctccatcacgctgatctcctccatgctgcttagtgtatttgtggcaatgagcctgacccctgccctgtgcgccaccattctgaaagccgcgccggaaggcggtcacaaacctaacgccctgttcgcacgcttcaacacgctgtttgaaaaaagtactcaacactataccgatagcacccgcagcctgttgcgttgtaccggtcgctacatggtggtctacctgctgatttgcgccgggatggcggtgctgttcctgcgcacgccgacctctttcttaccagaagaggatcagggggtatttatgaccaccgcgcagttaccttccggtgccaccatggttaacaccacgaaagtgctgcaacaggtgacggattattatctgactaaagagaaagataatgtccagagcgtgtttaccgttggcggctttggcttcagcggtcaggggcaaaacaacggcctggcgtttatcagtctcaagccgtggtctgaacgtgtcggtgaggaaaacagcgttaccgcgatcattcagcgggcaatgattgcgttaagcagtatcaataaagccgtcgtcttcccgttcaacttacccgcggtggctgaactgggtaccgcgagtggttttgatatggaactgctggacaacggtaacctggggcacgaaaaactaacccaggcgcgaaacgagctgttaagtctggcagcgcaaagtccgaatcaggtcaccggggtacgcccgaacggcctggaagatacgccgatgttcaaagtgaacgtcaacgctgcgaaagctgaagcgatgggcgtggcgctgtctgatatcaaccagacaatttccaccgccttcggcagcagctacgtgaacgacttcctcaaccaggggcgggtgaaaaaagtgtatgtccaggcaggcacgccgttccgtatgttgccggataacatcaaccaatggtatgtacgcaacgcctctggcacgatggcaccgctttctgcctacagctctaccgaatggacctatggtagtccgcgactggaacgctacaacggcatcccgagtatggagattttaggtgaagcggcggccgggaaaagtaccggtgacgccatgaaatttatggcagacctggtcgctaaacttccggcaggcgtcggctacagttggaccggactaagctatcaggaagcgttatccagtaatcaggctcctgcgctgtatgcgattagtctggtcgtggtgttcctcgccctcgccgcactctatgagagctggagtattccgttcagcgtgatgttggttgttccgttaggcgtcgttggcgcattactggccaccgatctgcgcggcttaagtaatgacgtctacttccaggttggtttgctgaccaccatcgggctttccgccaaaaacgccatcctgattgtcgaatttgccgttgagatgatgcagaaagaagggaaaacgccgatagaggcaatcatcgaagcggcgcggatgcgtttacgcccaatcctgatgacctctctggcctttattctcggcgtgctgccgctggttatcagtcatggtgccggttctggcgcgcaaaacgcggtaggtaccggcgtgatgggcgggatgtttgccgcaacagtgctggcaatttacttcgttccggtctttttcgttgtagtggaacatctctttgcccgctttaaaaaagcgtaacgtgtaaatgagagtaaggttgaacatgaaggttcagccttactctttcctgctaaccattcaccactcaacaaccagctaaccgtcaggaataccaggcttagtacacagcactgaaagtagaaaccactccagccattcgtcatcaatttgaacaacacaatactgacccacattcccgtaatcgtatgaattgtcagcttaataatcccaaacatgccgagtcttttcctcctgaaaataccgataccgcctggcaaactgcgaaagagaactagccggtagcccggcagaaatcatcagggaagagtttcacatgaagcaggtgtgagatcctgaccaatattcaaatgcgaaatatgtcaggaaaaggtacctgggctatgttgcgcaaactgatgtggcgttacaccataatattgtcgaaatgtgtttataaagtagcttgtactgctatagccacatttttccgcaatagtatgcagaggaatttgacgtaactcgagtaatcgtctggccatgctcatcctggaggcgagtaatattttactgaaacaggtattttcatcctgcaacttttttttgattagactctcgctggtatacattctttccgcgatatcgcgcagataccaacgtttggcgatatcaaagctaataaggcgttcaacttttccactaacagtgctgatgctattgaaaagtaaggggatcagttctttcttatgagaaaacatgcttaaacaggaaaggtagagcatattgctcagtatcggactatttaccccggattcattgaagctatcaaaaatcgccgtcaccagcggcatggggggactctggttaattaacaaacggtctttgctgtgtaaccctaaattgcgtggtagctgacgaatattttgtaagtaatggcaaactgtcagctcatcgatatccagtcgtcgcgtatccggactacaaaacgcaaaatcgtctgccaaatttttctccagcagcagaatactctcgttatgcaggcttattttttgctgttcatgataaatatcgaaactacgacgaatgaggatcacgctgcagacatgagtcatgattatcccttatatttcatactgcgattatttcaatttcagtatactaatgaaatgatgccagactgtttcttagcgcaaaaactgccagatttggtaggaccaaaatttatccacaaagtagttttgcataacagttaattgataataagtaaatgcagcacgaatatattttcgcacagcgtatagcttatgtttataaaaaaatggctgatcttatttccagtaaaagttatatttaacttactgagagcacaaagtttcccgtgccaacagggagtgttataacggtttattagtctggagacggcagactatcctcttcccggtcccctatgccgggttttttttatgtctgagtaaaactttataatcttattccttccgcagaacggtcagtgccgtaaaaattcccttgcgcaacaatacttgccgcgctgtcacggttgctcaatctctgcgcgcttcgctcctgatactctgtgggcgtcatcccataataatttcgaaagacgtaaatgaaatagctcacgctgtgatatccacaggatactgcaactcgcttaatactaaaaccatgtataacaataagttgcaaagcacgttgcattctacactcagtaagcaactgactataacttgtctcttcttcgcgcaattttttctttaacagacttggactcatcaacagctcgctggcgattcgggctagtgtccactcatgggcgatattattattgataaccgtacaaactcgtgttcgcatgttcggttgtaaaacgttcagaagcagcggtataaagtgctcatcctcaagaaaaacagataacaacgcaaagattaatgctcttttacgtagcatttctgcatagcgaagattcttattctggcttagttgcgcaacttcctgaaaaacaggaatatctctactacagtgatgaacgagtaaactagaaacttttttatgtgcatgaagatttaatgcctcctccttgagcatcgggagaaataaactaagcgtgtccctactcacgaatacaaaattttcaacacacttatctactcgaatttggcttgcatccgcaaaaaccaggtcaccgccattaaaatagcgatattcaccattaaccatggtgagaatatatttatgtcttgcatacgcaattagacaattcccatgtagactttgcatagttgacttaatattacataaacatattactgtttattaatgtagcacgccgccctcttaagtcaaattgattgataaataaatttaaacgaagcgggagaacaggatgataatgtgtgatgttctacgggcaggatgactggatttataatacaaaaacgtgtttaagaacacagggaaattaatagtaagcaaataatcccttttcgtgacattaaaggtaatcgctacatttaataaacattcatataacatatatcttatcaacacgatgaatagacagccaatatattattgcgattaataagcaaccgaatgcccagctgtttttttaaaggctgggcattcggtttttacaacgttatgttatcaggtgtgtttaaagctgttctgctgggcaataccctgcagtttcgggtgatcgctgagatatttcagggaggctttgtagtcttccagcaacagttcagcaaagtccatttcgaagccgcgacgacacataatgcgcatcaccacgatgtcggtggcttcaccgccgagagtgaaggccggaacctgccagccgcgcagacgcagacgttcagagaggtcgtacagggtgtatcccggatcttcaccatctttcagtttgaagcaaaccgccgggatgccttcgtccgggcgacccgtacagatgaactcatacggccccagtttggcgatttcatccgccagataagcggcaacctggtaagaggcgttctgtactttggtatagccttcacgaccgaggcgcaggaattcatagtactgtgcaattacctgacccgccgggcgggagaagttgatggcaaaagtaccaatttgaccacccaggtagtcaacgttgaacaccagttcctgcggcagcgcttcttcgtcacgccagataacccagccgcagcccagcggagccagaccgaatttatggccactagcactgatgcttttcacacgcggcaggcggaagtcccagacgatatccggggcgacgaacggtgccaggaagccaccgctggcagcgtcgatgtgcatgtcgatgtcgataccggtgtcggcctggaatttatccagcgcatcgtgcagcggttgtgggaactcatagttaccggtgtaggtcacgccgaaagtcggcaccacgccgatggtgttttcgtcacaggcttcaatcatgcgtttcgggtccataaacaactgaccggggcgcatagggatctcacgcagctccacatcccagtagcgggcgaatttatgccagcagatttgtaccggaccgcacaccaggtttggtttatccgttggtttgcctgcagcttccatacgcttgcgccaacgccatttcatcgccatcccgccgagcatacaggcctcggaagaaccaatggtgttggtgccaacggcctgaccatttttcggcgcaggcgcatgccacagatcggcaaccatatttacgcaacgcaggtcgatggctgcggattgcggatattcttctttgtcgatccagtttttattgatgctcaaatccatcaatttatggacgttttcgtcgtcccaggtctggcagaaagtggccaggttctgacgagcgttgccatcaagatataattcatcattgataatctgaaatgcgacatcatcgcgcatttcgtgcagcggaaatcgtttactctccgcgatagtagaaatggcctttgcgccaaaacgactatcgagtagttcactgcggaaatccgttaacagcttctggtccatttcgaactccttaaatttatttgaaggcaataaaaaagtaggatttatccgcaatggaagcaaggcattacaggcttaatttaaataacaaaatcctaagcagaaaaacgactttttataatataaacatttaacatgataatattaaaaacagactttattatcgtaataaaaatcgcccaaacattgctgttcgggcgatcaaattaattattgtttatcctgcatatacggcgtgtacaccccgttcagactgtgcaggaaagctacgatatcatccacatcctcctgcggcagctctttgcctacctgatagcgcagcatcagtttcaccgccccgtccagcgtcggcacgtcaccgcgatggaagtacggtgccgttaaagcaacgttacgtaaaccgggtactttctgacgcaatttatcacgctcttctttagtcacattcatacgaccaatatccgccgccgtaatttccccaaagttaaagtcttttttcagccccaacggttcaaaggaacgtccgccgagaataataccaccatgacaagttgcacatttattatctttaaataattgatagccttttttctgttgcgccgtcagcgcattttcatctccgcgcaaccatttatcaaatggggaatccggcgtaattaatgttttctcaaattcagcaatggcatcagtaatattttcgccactgaaaccttgcggatagacttcgaggaactgcgttttaagctgcggatctttttccagcttagcaataatttcgtcccaggatttgctcgccatttcaatcgggttcaacggcggtccaccagcctgatcctgcaatgttgccgcacgaccatcccagaactgctcaacgttaaatacactgttaaataccgtcggcgcgttaatcggcccaactgcgccaccaacaccaatgcttgtttttctgccatcgacgccccccgcattcaacgcatggcaatgagcgcaactaatggtgctatcagcgcttaaacggggatcgtgatacagcgcaaaacccaacgccactttttgcgcatcggtaggcagtttttgcgggatgggctgcaccggttcattgcgatgttccggagcagtatcattgctggcgtaatattccgcgcgctgttttgcaatccaggccagtatttccgcccgctcttcatcactcaccttacccgcccagtgtagcgcggtataacgcgttggtggcatagtttcatactgcatcacccattcaatcttattcaaatcgctttggctaacgggtttatcagccagcagtgccgcacgcacggcctcaaggttaaaagatttatatccaagcttaatgtcgtaatccatcaactgtttcgcgccaggaatataataataggcgggtaattctgcgctaggcgtgtggcaatagtcgcatcctttttcgcggagaaagcctaaaaccttattattttcactgacagcagatgcctgaacatcggcctgtttactgcgtttattatcgtggtaccacacataaccagataaccctaaatagcaaatcgcgacgccagccaggccgatcgcggtaatacgactgaccattttcattattcttccctcacggtggtgagttattgtgacccagaaaattttccagaatgctgcaaacgtctctgcgagacaaagccatcataaaaaacagggagatacgctttttgataggaatcaatcaattacatgaatataaactatcaataagatagcctgtgcctattacccagatcaggaatggcatatcatgattgcggcgagagcaggattgaatgttctgaaaatgaaaaacaacaccaaatcggtatttttataaattccattgatattagtgcgttatattttttgacaggttaataaacgtgatccaccgcacgctttgtcgcccaccaggcggagcgaatgactacccttaaagaaaagccgataattagcgacgaatttcggaggttggatccttatgctcaatcagaaaattcaaaaccctaatccagacgaactgatgatcgaagtcgatctctgctatgagctggacccgtatgaattaaaactggatgagatgatcgaggcagaaccggaacccgagatgattgaagggctgcctgcctctgatgcgctgacgcctgccgatcgctatctcgaactgttcgagcatgttcagagcgcgaaaattttccccgacagtaaaacctttcccgactgcgcacctaaaatggacccgctggatatcttaatccgctaccgtaaagtgcgccgtcatcgtgattttgacttgcgcaagtttgttgaaaaccacttctggctgccggaggtctactccagcgagtatgtaagcgacccgcaaaattccctgaaagagcatatcgaccagctgtggccggtgctaacccgcgaaccacaggatcacattccgtggtcttctctgctggcgctgccgcagagttatattgtcccgggcggccgttttagcgaaacctactattgggattcctatttcaccatgctggggctggcggaaagtggtcgggaagatttgctgaaatgcatggccgataacttcgcctggatgatcgaaaactacggtcacatccccaacggcaaccgcacctattatttgagccgcagccaaccaccggtttttgcgctgatggtggagttgtttgaagaagatggtgtacgcggtgcgcgccgctatctcgaccaccttaaaatggaatatgccttctggatggacggtgcagaaagcttaatccctaatcaggcctatcgccatgttgtgcggatgccggacggaagcctgctcaaccgttactgggacgatcgcgacacgccgcgtgacgaatcctggcttgaggacgttgaaaccgcgaaacattctggtcgcccgcccaacgaggtgtaccgcgatttacgcgcgggggcggcctccggttgggattactcttcccgttggctgcgtgatactggtcgtctggcgagcattcgtaccacccagttcatccccatcgatctgaatgccttcctgtttaaactggagagcgccatcgccaacatcagcgcgctgaaaggcgagaaagagacagaagcactgttccgccagaaagccagtgcccgtcgcgatgcggtaaaccgttacctctgggatgatgaaaacggcatctaccgcgattacgactggcgacgcgaacaactggcgctgttttccgctgccgccattgtgccactctatgtcggtatggcgaaccatgaacaggccgatcgtctggcaaacgccgtgcgcagtcggttactgacacctggcgggattctggcaagcgagtacgaaaccggtgaacagtgggataaacccaacggctgggcaccgttacaatggatggcgattcagggatttaaaatgtacggcgatgaccttctgggtgatgaaatcgcgcgaagctggctgaagacggtgaatcagttctatctggaacagcacaaactgatcgaaaaataccatattgccgatggtgttccccgcgaaggcggcggtggcgagtatccgttgcaggatgggtttggctggactaacggtgtggtacgccgtttaattggtttgtacggcgaaccataatatttttacagccagccgctaacttcctgctggctgtaaaattatcctcttcaggaggagatatttaacatcattgccgcctgggtgcgatttttcacttccagacggcgatacagggattccagatgcgcttttaccgttccggtactgatattcagcgctctgccgatctccttattactttcgcccgccgctaacatggttaaaatctcccgctggcgggcgcttaagcttttgagatctttaatgtccttttccggcgtcgtccgccagtctccaggcagaaacatcatccccatcgccgcactatttaccgccaacgcaaatgtctcgacggtactatcacgaggcacaatggccagcacattaaaatggataacttcctgtaaccaccgtttattgcaatccgtcgccgtaattaacaccttaacctcaggaaattgcaccacggttttttgcagcaaccagtagcaaaactcaccatcctgatcgccatcgagcataactaaggcttcagggtaactttccagcttttgccataactcgtctgcctgactggccccctgaatactcactcctggaatacgctgctgtaaactgattttcattccatgaataaatatactctgcctgtcaaacatgactatttgcataactgaatctccacctgaatacgttaaaaagacttaagtagtggaagggtattacccgcgagaaaaaataagaattcgccatttggcggtggccattctacagagatgacgtgtagaaaatagttaccgatataaatagttacagctaaacgcctgaaattacatgtcgagggcactatttaaaacaattttgaggatttccttatattggtggttagtacgcatgcaattaaaaatgaaattccgcgaccacaagccaaaataacaaacggcaaggagacaaaaataagcacaaatagccaacacgtcctctgttcactttaaagggaatcgctgaaaaatacgctctgtttaaggggattcacctttctcagaaagctattccgcccttttcctgctgagaaatcgccacattcggcatgacaacattgtgaaacccggcattagatgttagaaaaaacaataaacaatgcgatatgcgcgttactgtttcgctgtgaacaacaaagcgtcaaagaaatggataaaattcacgcaatgcagttgttcatcaaagtcgcggagctggaaagtttttcccgcgcagcggatttctttgctttgccaaagggaagtgttagccgccagatacaggcactggaacatcaacttggcacccagcttctccagcgcaccacgcgacgggtcaaactcacgccagaaggcatgacctattatcaacgagcaaaagatgtgttgagtaatctcagcgaactggacggtctgtttcaacaggatgccaccagtatcagcggtaaattacgcatcgacatcccgccaggaatcgcgaaaagcctgttactgccgcgcctgagcgaatttctctatctgcatccgggaattgagctggaactgagtagccatgaccgtccggtagatattcttcatgatggttttgattgcgtgatacgcactggcgcgttaccggaagatggcgttatcgcccgtcccctcggcaaactgaccatggtcaactgtgccagtccgcactatctgacgcgctttggttatccgcaaagccccgatgatctgactagtcacgcaatagtgcgttatacaccgcacctgggtgtacatccgttaggttttgaggttgccagcgttaatggcgtccagtggtttaagtctggcggcatgttgacggtaaacagtagcgaaaactatctcaccgccggtcttgccggtctggggattattcagatcccgcgcattgccgtgcgcgaagccctgcgtgccgggcggcttattgaagtattacctggctaccgtgccgagccgctctcccttagcctggtttatccgcagcgtcgggagctttcccggcgtgtaaacctgtttatgcagtggctggctggcgtaatgaaagagtacctggactgaccgactatactttttaagaatgaccacgacagaaggacaaaagagcggatgacgcaggaaaacgagatcaaacgtcccatccaggatctggagcacgagccgattaagccgttggataatagcgagaaaggcagcaaagttagccaggcgctggaaaccgtcaccaccactgccgaaaaagtccaacgccaaccggttattgcgcacctgattcgcgcgacagaacgctttaacgatcggctgggtaaccagtttggtgcggctatcacctatttcagttttttgagcatgataccaattttgatggtgagctttgccgcagggggctttgtgctggcctcccatccgatgttgctacaggatatcttcgacaaaattctgcaaaacatcagcgatccgacgctagccgccacgttgaaaaacaccatcaacaccgccgttcagcagcgtacgactgtagggcttgtcggcctggcggtggcactttattccggcatcaactggatgggtaacctgcgtgaagcgattcgtgcccagagccgcgatgtctgggaacgcagcccgcaagatcaggagaagttctgggtaaaatatctgcgagattttattagcctgattggtttgttgattgcgctgattgtgacgcttagcatcaccagcgttgccggtagcgcgcagcaaatgattattagcgccctgcacctgaacagcattgagtggctgaaaccgacgtggcgattgattggcctggcgatttccatcttcgccaactatctgcttttcttctggatcttctggcggttgccgcgccaccgtccgcgcaaaaaagccctgattcgcggaacatttctggctgctattggttttgaagtgattaaaatcgtgatgacctacaccctgccaagcttgatgaaatccccctctggcgcagcatttggttccgtgctggggctgatggcatttttctacttcttcgcccgtttgacgctgttttgcgcggcgtggattgccaccgccgaatataaagacgacccgcgaatgccggggaaaacgcagccttaaaataggccggatgcggcgtaaacgccttatccggcatacgattttattcggcctggctccccgtaggccggataagatgcgccagcatcgcatccggctataatgcgcacataacctcttgaaactcgtccccagagcctcttcagccatctatttgggagcaaacaatttcattccaactcataaccccagcatataaatccagttggtaacttttatttaacctgaaaccagttttatccactatttataaaattatgtgaagcatttcatagaagaaaaatcactggcctaaacattatcccctttttgcctgatttttgaccatttccgcgatttgttacacattgaaatatcacttttgctgtgcgtaatatggctattcgttagccaaaaaataagaaaagattatgcaagcaacagccacaacactcgaccacgagcaagaatacacgccgatcaacagccgtaataaagtccttgtcgcctctctcattggcacagccattgagttcttcgacttttacatttacgccactgcggccgttattgtgtttccgcatatcttcttcccgcagggcgatcctacggcagcaacgctacagagcctcgccaccttcgccatcgccttcgtcgcgcgccccattggctctgccgtttttggtcattttggcgatcgcgttgggcgtaaagcgacgctggtcgccagcttgctaacgatggggattagcaccgtggtgattggtctgctgccgggctatgccacgattggtattttcgccccgctgctgctggcgctggctcgatttggtcagggtctgggcttaggcggtgaatggggcggcgcggcgctgctggcgactgaaaacgccccaccgcgcaaacgtgcactgtatggctcctttccgcagctgggcgcaccgattggcttcttctttgccaatggcactttcttgctgctttcctggctactgaccgacgagcagtttatgagctggggctggcgtgtgccatttatcttcagcgcggtgctggtcattatcggcctgtatgttcgcgtgagcctgcatgagagcccggtgtttgagaaagtcgctaaagcgaaaaaacaggtgaagatcccgctgggtacgctgctgaccaaacatgttcgcgtaaccgtactgggtacgttcattatgctggcaacctatacgctgttttacatcatgacggtctactctatgacctttagtaccgccgccgcgccagttgggcttggcctgccgcgtaacgaagtgttgtggatgttgatgatggcagttattggttttggcgtgatggtgccagtcgctggattactggctgatgcctttggtcgccgtaaaagcatggtaatcatcaccacgctgatcatcctgttcgcgctgttcgcctttaacccactgctcggttctggcaacccgattctggtttttgccttcctgctgctggggttaagtctgatgggtctgaccttcgggccaatgggtgcgctgttaccagagctgtttccgacagaagtgcgttacaccggagcaagcttctcttacaacgtagcgagcattctcggggcttccgttgcgccatatatcgcagcctggttgcagactaactacgggctaggtgcggtggggttatatctggcggcgatggctggcttgacgttaatcgccctgctgctgacccatgagacgcgacatcagagcttgtaataagagtgaaaagcctgatgcgctacgcttatcaggcctgaatttccatacaatatattgaattcgcaaggatttgtaggccggataaggcgttcacgccgcatccggcatgaacaaagcacactttgccaacaatctaaatctgtttaattgccggatgtcagacatccggcaattatcatcacttcttcatctggctcaaaatcgtccgacactgattagcctccccttcggaaggactgatcagtgccagtaacgccgccgccggtgttaccagcgttgccagtgccgcagcaacagcaccacgggcaatcagcggtccggctttcaccccagcctgcggatttttaaacgtcccccgcacatacagcgggctacgcagtgtgataatccgaattcctttactctccggatcaatagtcaaatccagctgttcgctagcaaaacttgccgtgccggtaacattaatcaacgcgttctcagtatcgaaagcaaaaatctgcgggcgcgccacgccgttggcaatattcagattcgccgccgcgcagttcacccgcacctcatcatcaccaaatatcgcaccgacaatgtagttgccgacattcagcccaacaatctccatcaggttgcggctcaccagcccgtcattcatcaacagtttcaggttgccgttactgttgcctaaaagtgccgccacgctgttaccgctaccgcgtagttccgcgtcaccgttcatttcccccagcgtcttctgcatcagttccacatcgggcatcagttctttcagtttcagtcgacgagcctgaatatctgcccgcccctgcatcggctttttatcgccttccagatgaatattcgccgcaatgctgccgcccgccatgccaaatttcagcggttgcaggcgcaggtcagcatttttgaggatgatatgagtagaaagatcgctaatcggcaggctactgccatgctcaatgcgccgccctttgaagcgaacatcggcatccataacgtcccatttatcggtttcgaagcggtcataaggcagcactttgcccgcaggctgaacgcttttttcgcccttcttctgttcagaccgtttgctcttttctgcccctttcccggaatcaacgccaatcaacggtcccaggtccgccagccgcaattgccggctctcgacatcaccttccagttttggtcgtggctttccggtggtgtagaccagagaaccgtggatatcgctatcaccaattcgcccattaaaaccgcgataatcaaagacgctgcttttttcagtgtcgattttcgctaccagccgaccatccgtttcaaacggcggggtatcgggcagcagaacgcccgtcagttcatagagatcacccagactatcgccagaaaatttaagccgtaaatcgacaccgcccatcttcattgggtcattcacgacgccatcaaaagcaacacgggtgttaccagagcggaaatcagcctgtaccggaaacggcgtcccttcgccacgcagcgccagcataccgcctatttttcccgtacccgtgagcggttcaccgttatatcgtccctgcgccttcaggccaaaaacgtaatcgcccaccttttctttatccgctttacctttgcttccagtaacttcgctgaacggcagcggcttgcctaagggatcaacaaaaatctccagatccgctttgcttactttgtcatcaatggcgatccgcccttgatcgaaaagaatattatccagccgaaagctccatgcgctcggctttgcattcgcgtctttgttatcatcgttggcaagattaaacgtccagttattgttcttttcagagaggcgaatcaggcgcgcgtcgggcttttcgagcttgatccacggcagccagaccgttttggtcagcagcgccagcggggccagcgttgcctctacgcgtggcaaatgcaccatcgtgacttcgggaatatccggtggattgccaagaatgatgtcttccgcgtgtacatggggccacggcacccagctgcgccagccagtttcttgtttttgccgctcccacaccacgcccagatcgccacggatagcgaacggacgattcaactccgcagagactttctggttgatagtcggtttgagtcgattccagtcaaaagttgcaatcaaaatgatcgccacgacaatcaacaacaagaaagccccactaatcgcagcggttattttgcctgccttgctcatcgttcgcttcctcatattcttcctgtgccagtcctaaagatagtccagccaggcggaaaatgaggcagcttatagcgccagaaccgccgtattcagcgtttctatcggtgccgggcgactaagaaaccagccttgtgcggcgaatgcggggctgttctgaacatcacgccactcttccggcgtttctacgccctcgacaatcaccccgcgacaatagcgattcattagatgtaaaagctgagaaaagagtgtgcgtccttccgggctctgacgcagcatcacaaacagttctcgcgcgattttgatgtagtcataacgcacttcacttagcgcagagaaatttgccatcccggtaccaaaatcatccagccacagcgggccaaattcacacatgctggcaaaggtactatctttcggcagacggatatgctccaccagttcgaaacgcagccagggaagacgctcaatctggcgcaggatttttggttgctgacgcagggcgatgagcgtagggccatcaatattgacgcttgccagcaggccgtgctctataaagaagtcggctttttgcgccagcaaatcaatctgctctttcacaacctccatccgatggctgacggtgatttcagtaaaatagcgatccggcggcaggcgttggctagggttcaagggatgcgtgaccaccgttaatagctccacggccattaaccgcccgcatgtttgatagatcggctgccaggtgtaagcacgctcacactgcaaccaaaaacgccgttcctgcaagctctcgatgcttgcttcagggttgcttattcgctggataacctgccttatcatcaaagatgtcctgtgtttaaaagtgatgctgcccggactcgacaaagattatcggcgcgtaagggcagaactttaccgcctggccggggtaaatttcctcactccacaacggaatctttcaggaatacgttctggctcaaaaaaataatggaacactgttttaatatggttgaccagcaaaccaccacagcgcaaactaacgctaattttttacagatcaggttcacgactatgtccaaaaagattgccgtgattggcgaatgcatgattgagctttccgagaaaggcgcggacgttaagcgcggtttcggcggcgataccctgaacacttccgtctatatcgcccgtcaggtcgatcctgcggcattaaccgttcattacgtaacggcgctgggaacggacagttttagccagcagatgctggacgcctggcacggcgagaacgttgatacttccctgacccaacggatggaaaaccgtctgccgggcctttactacattgaaaccgacagcaccggcgagcgtacgttctactactggcggaacgaagccgccgccaaattctggctggagagtgagcagtctgcggcgatttgcgaagagctggcgaatttcgattatctctacctgagcgggattagcctggcgatcttaagcccgaccagccgcgaaaagctgctttccctgctgcgcgaatgccgcgccaacggcggaaaagtgattttcgacaataactatcgtccgcgcctgtgggccagcaaagaagagacacagcaggtgtaccaacaaatgctggaatgcacggatatcgccttcctgacgctggacgacgaagacgcgctgtggggtcaacagccggtggaagacgtcattgcgcgcacccataacgcgggcgtgaaagaagtggtggtgaaacgcggggcggattcttgcctggtgtccattgctggcgaagggttagtggatgttccggcggtgaaactgccgaaagaaaaagtgatcgataccaccgcagctggcgactctttcagtgccggttatctggcggtacgtctgacaggcggcagcgcggaagccgcggcgaaacgtgggcacctgaccgcaagtaccgttattcagtatcgcggcgcgattatcccgcgtgaggcgatgccagcgtaaacgcagcatatgcaaaaggctggataaagtgttacccctctatccagctcatccataaatacctgatggttgtgctaactcatcaccatcaggcattactgtgcaggtggaatatccgtcacttcaggatgtacgtcatccgtggcgacagaggtggtcgcagcggcggtagatggggccatgatttgatcccagaccgcctgcaacgctttcatgttaaattccggctcgcctttcggctgcagcagtattaacgccatatcattgctcaactgttgacgcagatcctgatttaacatctctaccgtcaggctattaaggaaatcctgccgcagtttctgatattgctccggcgcgatatcgacaacctgattttgcaagctacgcatccgctgacccatcagaatatcggtatcagctcgtgcataggcggcaaacagtttctgcagctccagtttcttttgcgccactaacgcattgaactcttcttccggcagacctttatcgcgaaccttcgccagttcacgcgccaccagattaaggttgctgttcagcttgtcgtttggactttcgatgttgatggcacactgcgcacgcagatacagcacacggcagtcaaatccaagaccgatgtctttgctgttactggcacttaacgcttgctgaacatgccagaacagcgcctcgcgggccaggtccgcacgccagtagcgcagcagtgcggcactttcacgaatcggctgccacggcgtatcccacatgatagataaccggtcctgacgcaccgcgtcagtcataatactcaccgcttccgcacgcagcggagaaagcgtcggcaccggagctggcgtttcacgtttgcctttcagttcgccaaacgttttgtttatttggtcgacaacgctgcgcgcatccacgtttcccaccaccagtagcgtcattgcatccggggtgtaccatttctgatagaaatctttaattttttccgcttcaacgggttgtttcagcggatcggcaggatcgtgacctaacaaggtactccctttcagacgatagcgccaccagccctctttagtatcggcaggccaggttgccaccatgtcctgactttgcagcgcgtggttgatggtttctggtgtgatggtcaatttgccagtggcatttgccagataagagagcgcttctttcagcaaatcgttacggttattgggcaaactcagattaaacagcgtggtgtcataagagacaattaccggcggcatcgggcgtttagggtcgatcccctgctgccacaaactacgcgcctgtgctgcgtcaaggccaccgctttgcgttagcgcaatacgagggatggcgtgactgtaaccgctctgttgtgtactttcggcgaggctaccggtattaaccagcaggcgaatttcaacacgatcgctgggacgctggggggtggtcagcacttgccactgtaaaccgttggaaagcgtcccctgttgccatgctggatcaggctggagcgcatctgcctgcacatagccagcagtggccatcatcagcaaaccgcccgctaaaagtcgaatttttgtgccctgcatgtgaacccctgatcaactatcctggtaataaaaaaactgcccgttgtcggtcagtctaaatgacgttaaaaacacttcgtgttagaccgcaagaacatgaaaatgtcacggaagaagtgaaataaacctgaactcacccaggtggtaagttcaggcacaggggtcaattatgcgcaaacacccgcactcggggaagggagtgcgggcataagtgatgagattaagaggataattcgtgcgttttgccatccggcgcacgattattcagcacatcgtccagttttttgtggtccagttctttcacccacttagcaacgacaatggtcgctacgccgttaccgaccaggttagtcagcgcacgagcttcactcataaagcggtcgataccgaggatcagcgccagacccgctaccggcaaatggcccaccgcagagagcgtcgccgccagcacgataaagccactacccgttacccctgccgcccctttagaagaaagcagcaacacgattaacagcgtgatttggtggacgatatccatctgactgttagtggcctgggcgataaacaccgccgccattgtcaggtatatgcttgtgccatcaaggttaaagctgtagcctgtcgggatgaccagccccaccacgcttttacggcagccgagtttctccatcttgtcgagcatacgcggcagcgcgctctcggaagaactagtccccagtacaatcagcagttcttcacggatgtagcggataaatttgaagatactgaaaccagtcgctttagcgatactacccaataccagcaccacaaacaggatacaggtaatgtagaaacagataatcagctgccccagttgcaccagtgtgccgacgccgtatttaccgatggtaaacgccattgccccgaacgcaccaataggtgccagacgcatgatcatattgatgatgccgaagatgacctggctgaaactttcgatgacgttaaaaatcagttggcctttgctgcccagacggtggagcgcaaaaccaaacagtacggcaaacagcagcacctgcagaatgttaccgctggcaaatgcgccaatgacgctcgccgggatgacatccataatgaaggcgacaatgccctggtctttcgcctgatcggcgtaaaccgctaccgctttcgcatcaagcgttgccggatcgacgttcattccggcaccaggctgcacgacgttaacgatgataagaccaataatcagcgcgatggtactgacaatttcaaagtaaagcagtgcgactgcgccggtacgaccgaccgccttcatgctttccatgcccgcaatgcccgttacgacggtacaaaagatgacaggagcgatgatcatcttaatgagcttaacgaagccgtcgccaagcggtttcatttgctcgcctatttcaggatagaaatggccaaggagaataccaatggctatcgctgtcaggacctgaaagtaaaggcttttaaacagagaggttttcatagggtgtcctttagtaaaaccacaggtcttgtaaggttatggggtacctgcggccttaaaataacacccagacaacatcacagaaatgtacctggatcataattgaaacaaaaaggttaaaaagtttgagctggctcgcacaaaccagcactttttaaagttttgtaatcagtttggggtagttacttttcttccaggtaactctcttcgaagatttcaatagggagtgggcgagcaaaaaggaagccctgggcaataccaacgcccgcttttgccagccagtcgcgttgtgcttcagtctccacgccttcggcaatcatttgtaagttcaggctctgcgccagcatgataattgcagcaatcatgctgctatctcccggcaagccttcaacaaacattttgtcgattttcagtacgtcgattggcaagcttttcatatgctgcagctgacgcagccctgcgtagcccatgccgaaatcatccagcgccacccgaactccggcattgcgcagcggacggaggattgccaccgcagcatgagggtcgtcaatacgtcggctttctgtcacttccagaatcagtgttcccggctgaatgcgatagcgggttaacagttccagcatatccgccaccatattcgggtgcatcagttgcagcgcagagaggtttacgctcaagggcagcataatgccgcgctcttgccaggctgcaagcaatcgacaggactcttccagcacccagtgaccgacggtaaccatcagcccacagcactcaatgcgatcgattaagccatccggcaggtcccaactgccatccggttgctggatacgcagtaacacttccgcactgaccagtttaccgctggtcatctcgacctgtggctgtaaccaaatagcaaactgatgattttccagtgcattaaggatatcgctctcttccgtcaaccgcttctgggcggcttccatctgctgcggatcaaagaactgaatctgattcttgcctttatggcgagcggtaaatgccgcagaaatagcgcgactgtaaagctgttcggcggtgagatcgccgtagaacatcgccacgccaatgctacagtgcggacggagttgaatacgttcaatcggcaggcgctcgctcatgatagtgagcacttgctgacctaaggtgattgcgtgccacggttcctgtacaccgttggcaatgacagcaaagtcataaccgctaatctgcgcgaggatcatacgtgggctcagtacgcttttgagtttttccaccagcgtcagcagcagaatttctcgttgcgcctctttcagcacgcccgcagtatcacgcagggtttcacaggtgatgatcatcagcgcggtggtttgtttacgcgcgacaacctgctccagcatctccatcagcaaggctttgttcggcaaatcgctcaccgggaagcgcatcgcattttcgttctgttcttcataatggcgctgcagcaattgctggttgaggttgtaactgcgcaccaacataccgatttcatcgtcctgatgcagacgcggtaatgccagttggtgaccaacaagctccttggctgggatggcgttaagttcgcgagcaatattgcgtaacggatgcaaaatcaggcggttaatgcaccagctgatggcgacggtcaggataaggctcaaaagtaagtaaatggtcactaacgtactgagggtgctcatcacgaacttatacatacggaaggaatccgcctgtagtaccagataggcaattggctgcgggtttgccggacgttcgaggctgtaaacgcccaggctgatttgaaccggtagctcaaacaggcgagtaaccattaccggcaccgggcgctctggaataaaacttttacgcagcgcctggaactggttaggcagcactacatcggcacggctgaccacgcctgccggtttaatgctggcaagaatagcttccgcttcgggaatatcgcctttcaaaatagcactagataagggttcgcggacagagcgagcaatgctttccagttgcgtagccgtgttatagcgattctgctggaccagatggaacagcaaaacggtgcaaaaaataaaaacgaacaccaggacaacggctgccaccattgccatctgcttgattgttaacgagcgacttacgcgcaaattgtctccccccggaaatcccagattgccgcccgagtatacccgatcgcagcggcattaagagaggcgctatctgaaaacttaccagtcggcgtaaggtatcagcggctgcggcggtaaatccatgtcaccctgccatccggcggcggaataacgtacgtagagcaggaaatggctgggtgcgtaatctttcgcctgctggatatcaattgccgtgccaacaaaccagttggaagtaacacgtcgttcaagtaatgcccgcgccgtgtagccgaagccctgactgctgccgccatcgttggattgccgcgcagcttcttcctgccagtcggtcgggatcagattcatcagcggataacgcggcatggttttggtgcgactatggctccagctgccagacgcacccagctcccagctccagttttccgtgcgctcccgccacatcaccggtatggcaaagctcaggtattcctgcggactgtagtaaccgccctgaccgagactgtagccactcagatctttgtcgtaatgccagatcatgttgttcaggccgattgtgacgcggcgattgttctggttaatgaccttatagtaatagcccgtcatccagcgcacgcgccagttatcttcgacatttttaccggttaactggtcgccactaaggcttgcccagacgccgtttgcttcacctttatcgtagctcagacttagccccacaccgtcggcacgtacgccaccccattttttcccggtattgctcggggagtctttttgcccaccaaaggccagcaaagaactggagatgggccgacggtgggcgttaacggtgtaacccagcggcccgatatcatcgctgtaactgatgccgccgaccacatccaccacgttgaagcccatcggcgtggtaccgatatcccagctccagacgtcatttcgccagccgaccgccacgctggcaccggaatcgctctggctgcggttgccgctacagtcctgtaatgtacaggtgccccagttgtcatcccatttgccatcggcattagtggagaaactgccgacgttcatattgacgaaatcactgcgaaagaacatccgcccgtcagaatacggcgcatccacctgcaacatggtagtgtgcgctttcagatcggagtaaccaccggtgccgctgctaccccagtaatcgtgctcaagggtgacgttaagatcctgctggcgatagaggtccgccgcatcgctgcgcacgccacgtttcagccagtcatctttctcgtcgttacgggtcagtcgggtaaaggtgtcgttatcctgcggacgcgtcgtagtcacaccggatgcgaccatggcgtctttgtaggtttccagcgcctgcgttggatcgcccgcctgcgcttcaaacttcgcaccatcacgcagcaccatcgcgctttccatgctcggtggctgagattttgcctgcgggatcaacttattaaacgtccgctgcgctgctgcggtatcgccaagctgcgcctgtgccagcgccacgcgccgctgtgtgttcaggctggcgttatcggtagcgggcagtttcgccagctggctacgtgccgccgctttgtcaccggcagcaatatccacttccgtcagaccaagaatggcgtcggcgttagctggctcccgcgtcaggacattctgatatgcagcgcgggcggcggtgtaatcacgtcgttgttgcgcccagtcagccagcgtgaggtcaatacgcgtggaaggtggttgctggcgcagcatcgcttccgcttctgcctctttgccgctttctcgcaggcggttagcggtttccagcacctgatcgctttgcagtcgattaaccagctcctgaatattgctgttccactgcgcacgcggcaggctattgatatgcgccagcgccgctctgtcctggtcatgaccagagaggtacagcccgtaagcgtaaacctgctccgggtcgttgctcttctgctgcgccagattgcgcattaacgtatcggcctggctgcgttgtccggcctgccagagatcctggctaagtcggtaagtaatccatacgctgccggggtccagcgccagtcgttgccgctgaagtgctgccgcctgcgcccatttgccctggttttccagtgcctctgcctgctgtgccagacggtcgttttgcaggctgcgttcgatatcatcaatgctacgccgctgactggcagagaggctggcgataaacgcttcagctttttctgggctttgctggcggtaaatatttgccagcccgcgcacggcgttagtgttgccgctgtccatacgcaaggtctgctgataataacgttcggcggcgggataatcttttcgcgccatcgccacatcgcccagccccagcactgcataactgtcggtgttatcgacattacgcgcctgctggaacaggcgttctgcccggtcaggattattggctttcagcgcagcatcgccctgctggatcgccagccagtagcggtttactttcagcagactgttccatttgtcgttgttgctgctgtgcgggtccagtgcgagggctttttccagattcgccactgcattggcgcgatcgcctttctgagaatacgcctggcccagcgcccccagagcttcactgtctttcgggttcgcccgcaccgcctgttgtagttcgggaatggctttacccgccataccagagtccaccgccgctaaaccttgcgcacgagcgcggaaagcaggatcggccagctgtttttgctgttctgccagttggctttgcgcagccgccacgctatcgccatcactaaagatgctgagatattttttcagcgcgctcacactggcatcactgacgggcatgtctttaatctgcccgtaccagattttagaggccccttcgcgcccggcgttgctttttgccatctgttccaggacggcaaaaccttcgtcacggcgatcgctactaaacagcaatagcgccagattgttttgcaggcccgtattgcccggtgcatccgcattgatgcgttttaactgattaatcgcttcgccacggcgagccggaattttcgccaccgtactccagtactcgacagcaatgtcaccttccggcggcgcaccgttgaacagtttgttgtaactcgccacagcttcttctgcatgaccggtcgtcgcctgcaatcgtgcctgttgcagtgcctgacgaccatccggcgtggaaagtagcatcgtagtccggctgcttttatacgcattactactcggcgctaactggctcagccgatcgagctgtttttgcgcgccatcaatatcgccctgacgtaacaaagaacggaaacgggcggcaacgacgtccgggttattcggatcaataagttccagccgatataagctctgttgcaccagatcttcacgatgggtcgcttcgcctaaccgaacttgctccagcaactgttgctgagcggttggtgctgcctcgaccatcggcatgacggccagaccgagggaaagcgtgaatatgtttagtgtgaatttgcgcattcctggccccagtcaggtaattactttagtgactatttgcgcattcctggccccagtcaggtaataactcaccttttgtgctgaagcggaaacggtgttgatcccagccttgtccaaacagggtcagcacatagttgtaataggcatcgctgccgggaaagttatcggccacgcgctggcgctgaacggcctgcgcatcgcggttttgtaaaaagggcagcatggcggcagaaaaaccgactggtcctttaccctgcgctttccccgtagccacatccactttttccggcggataaccgtttttctcagtgaatgtcgccatcggtttaaaccggttgagcatccgcgctttttgcggatcgctgtcaggcatcatgcctacccacatgtaaacgcggatagcgtcgtagctgctgatcaatgttttttcggcttttagctgccagcctttgtctttctcatagcgcacccagtctgggctaaaacctttcggggcggtttccagcaataaacgttgattggtttcgcgcagcgtggtccacggcgcgccaaagcgggtgaaatactgcgccagcgtcggcggcaggtagctggggttaaaacgccagctgttatcctcagcaaaacccactttgcccggtaacaacatggaacccagcccaggcaccgtcaccacttcctcccgcgcgatacgttttagcaacgcgctgccgatgtcggtataacgctgctctttccacaaacgccccgcctccagcaagctccaggccatccagacatcaccatcggaggcgctattgctgtccagcacttcccacttactgttctctttcttgccccacagccaggcgggcaaacgttcttttaaagaaccctgagcgagattgttctgcgtccagtcgagaatattatcgaaagctgcacggtcgttagccgccagggcagagaacatgccgtaactttgcccttcggaggtggtgattttgcgcgcgtcgctggggtcgatgacgcgcccttcctgactgatgtaatcctttttaaactgctcccaggcaggccaggtacaggctgcctgaacactaaaggcagccagcagcagcatcgtcacgattccactacgcaacacattcatcttcaattactcgttatccgggttaagacgacgacgactaataattcgcagcagacgccacagtacccatgccagcaatatcacactgatagccgccagcaccgccagcagaatcggatggtttgccagcgcataccacacgcgctcgaaccacggcagatgacctacgtaataaacgtcgccaacacgtaggctgttgataccggactcgcggatcaccgcgacgctaccgaacatggtggcgcgtttgccgctatcgttcaccgcatcgttaagcatttcataaccgcgtgggctatctgccaacagcgcaatcacgctgcgctggtcgttatacgggctctggaagccaatcaccgccgccatcgcaccggaagaggtcagcgtactccgggtttctgccgcgcgatcgctctcgtccggcacaatgccggggaacggggtctggcgcatcggtgttttcacccagctttcggtcgcctgcaccaataggtcgatctgcttatcgtctttcagtttgtccgggataccaccgatgatcatgatgtcggcatctttgccctgaatggtgctgccatcatcggtcaccgtcagattaatcgccgggaagcccgtctgtgcgccgataaaaccaacagtattcagcaacgtttccatctgtgcttcgttaggcgctttcggcatcacggtgatggtttggctcagatccgccatccggctgaatgggaagcccgcgttagcaaaggcgcgtagatccggcatcgggatgaagtggtaatacttgctgaagtcgatggtggagtcgtcaccaatcaccacatgattctgcaccggctggaaggtaatacagttatccacgctaccgcccggcatcgggttcatatactcaaagtcgaagcgcagctggttggtcgcgcccagtttcagcgccggaatagagacatctgttttgccatccagcaaaccttgtaataccggaatccgcagcagcaggcggttcgcctcctgtttgctgctcaggttgaaggattgcaggaactggttattcaggctgatatccatccggctactgtctttcaccggcggcatggtgtagcggtaattaatatccatatcaatgccggtactgcgcatcaggtagagatccggcggcaggtttaggctaacgttaatcgctgctggctcaagaccgctggattgtaactgttcttcataggttttcagttcgccaaatgtgaccggacgatcggtacgtacccagttcggcgcatcgtacggcttacgcggtagcagcggtttcacttcattcactaccacgctttcaccacggaacagaatgttaccctgagcgatacctttcgctgcctgcaacaggtctttgtcgtcacgaccaaacaccaccagcagtttgacgtaaggattctgcggatggttaatcatctcaatcaccggggcttttaccgccggatgatcgcgcaggaagtccggccgtttgtcgttggttgcaaagacaatggcattgcgatccggcagttggttatagagtaccgggaagttctgcccacgccagccagaacggctaccaaaccagctggcgacaatggcagaggcttgttgcagcccaacatccggcgcacccgcaaagaccatcggcaaggtgttggtgcggttatcgctcgggtcaaagaatggcaccgggaagtgactcaggtcattcttcacattcagggtctgataggtcagatccagtccactgctccgcccaacatccagccaaagcgtggtgctggccggtttttcgcacacgtcctgataatggccgacaaactccagccgtacacggttgaagtcgctaataaacagtgggttaatgggcatttgcgccagcgtttttttacccaactgttctttggtcactggcagcacgcccatcagttcatcattgagataaacctttaactggctctggacaggcagtaagcttgggcttggggtgtattcgaagttgagcatcgccttcgtcaccacttcatcgctgcgcataccaaactcaatgctgccgttcgggttaatgccacgtagcaccatgctgcccggcggcggtgcaatttgcgcaaaggtcagcttcacatcacggctaggaccgttctgcgccacgactggcgcatcagcgccctgcacgcccggcatcacttgccccacctgcggattttgttccgtctgggcggctacagctggctcagcattgatcagtggttgcgttgctggcgtcgcctgcgtcatgaaagaggggaacgcactcatccccatagccactgcacaaatccagaatagttttcttttcatcgcgttatcatcattgttgagccaaagcctgatcgcttggttgtgccgtttcgctccgctccgggcggcgcggaataaagcttacaacccaggaaaccagagaagtcagcacacggaatatgcccttcacgctagaaggcgcaaactccgccagatggcggtagccacggaagccgagcttcagaatatccagcagactttccagcggcttatcttccgggtagctgtcctgccagagcgcccatgtatccgcacgggcaaacgtacactgcacaaaatcgatatgttgctgggtggtgagcggcattaatttcagcccaacttcattacccatcacgcgcgccacctgggtcgggaagacgtattcctgctgaccgcgtttaagcaacagattcactttctgcccttccagaatctgcgcctgaccgttgatcttgatccccaaaccaccgtcggagaaatcctgaacggtacagctgaagaggtgaccatcttcgcgggcaattgccgcgggcatcgtcatctccacgcggtggcttcggcgtacctgtttgctttctacgcttaccgcaactgcgccgccaagaacaatcaggttgtagaacacccacaccatactgacgaccacggtgagcatctcggttggcgggccatagaagtagcgccagatgcctaccgcaacgcccaccaggttgagcaggacaaggaagatgtagggccggctgatcacccagtcgacgtactcttcttccaccagtccacctttggcggtgacgttaaatttgcctttgtgcgggttaatcagcgccaccagcgtcggtggtgcgatataccacgccagcaccgtttcgtagatttcactccagaaagagtggcgatatttgccctggatcttggagttggtcaggctggcatggatcatatgcggcagcacgaatagggcgatcatcaacgctggcgcatagatgatgtaggcatgaagcagcaggaacgccagcggcgcagtcaggaagatcagccgtggaatgccgctcaagaagtggaacatggcgttgacgtaacatagccgctgagcaaacttcagccctttaccggtgagcgggttatcgagacggaagatttgtaccatcccgcgcgcccagcgaatacgctgaccgatatgcgcgctcagactttcggtcgccagccccgccgcctgcggaatacgcatatacgcggaggtatagccacgacggtgcaaccgcagagaagtatgcgcatcttcagtcacggtttcgacagcaatgccgccaatttcatccagcggcttacgacgaatcaccgcacaggaaccgcagaagaaagtggcgtcccacatatcgttgccatcctgcaccagaccatagaacagcgtgccttcgttcggcgttttacggaaacgccccaggttgcgttcaaacgggtccggactgaagaagtggtgcggcgtctgcatcatcgccagctgtttttctttcaggaaccagcccatggtcatttgcaagaagcttcgcgttggtacgtggtcgcagtcgaaaatgctcacgaactcgcctttggcatatttcagcgcattgttgatgttgcctgctttcgcatgttcatgagtggtgcgggcgatatatttcacccccacgttttgcgcaaactggcgaaactcttccctgccgccgtcatcaaggatccagatattcagcttatctttcggccagtcgatacccaggctggcgtaaatggtatttttcaccacgttgagatcttcgttgtaagtcgggacaaagatatccacgctcggccacaggctcatatctttcggcaatggcaccggctgacgattcagcggccatactacctggaagtagccgagcaccagcacaatccacgcgtacgtttcagcgaagagcagaataagcccgcacaccaggctgaccggatcgtcccagttcagcgtagaggtgtaacgccaccagatataacggcaagaaacggtcaggctcagcacaatcaacattagcgcgctgaagcgccccggcatccgccgtacgatcagcgctaccccccacagcagcatcaggaagataaactgcgccagcgggttaaacggctgagtaacgcagattaacgccagaatcaggctgaaggtgacgatgataccgaggatcaaccgccgcgccccggcactcaaatgaccgagctcttttttctcatccagatgctgtgttttatggctaacgcgctcaggcagctcgttcatccattgatggtaacgtccacgaatattttgcagaccactaaatgcccgcctgcgcggtttcggcgtttctttgcggcttgcaccgatcaataaccagcatgtttgaatgagataacggaccgggtccagcggacgcggacggctggcgttgatatgcggatacaggtttttatgttctgcgcgaatacgctgccagcgcgggtgctccagcggaataaaaatccaggccaggatcatccagaaacagccgagcgtcgcgctgaaagcgctcgcaccgtgacgacgataatcgcgataacgcccgataagccgcgcgttgaccggcgggataagcaaccaccgggtcaggatactcatgatgcactcccgactggcgtttacatcaacttgcactcccgactggcgttttcagcccggagtagttcaacaggcaccagttcgccagcgtcagtatctcttcagccgccagcgcatcactgcgatattcacctactggttgcttagccgccaggcattcagccatcgcttcatcacgatgaatgagcatcggcagtaatcggcgctggctttgcaaccaaagctggtaaatatcgtcctgaacctgactgccaatacggaagtcattaatcaaaatatgtgcgccatccggcagcgcttgctgatgcagtcggatatggcagttggcatccacattgacgattgccaggctgtgatcgcacaaactcagcagctggtgggttatctggctggcatcacgcggtaagtcgattaaaatccactggtaacgcccgctggcttttagttgctgtaagccggagcaaatatcgctcagccgggtttgccagtgctgtggattttcttgttcttcaatggataactgaccaaaaggcagcaaatcgagctggctggtgtagcgcaacccagcgtcacgccagtcctggccatccagcatcgctctggcccagccctgacggtgggtaaaatcaacattaaaactcaggcgcaacaagttgtccgggcaggcatcgaccaccaggacattttctcccaacatttgtaaactccaggctaatgcggcggtgatggttgttgtccccacgcctccccgcaccccctgctatcccagtacggccattcaccaatcccttacttttgttgcgcaaactctgccagcaacggccagcgttttaatgccgcggccaactgttcgcgttgggaaatatcggcataatcaatatcaggcagactaaatgcctgctttaacgccacaatatcattctggaagatatagcctatcgcgggatcaggcagagtatctggttcattgttattcattttgcttgatccctatgaaataaccgtaccgttcatgagacaattctaaccgtgagcatttcgccggtttattgtttacggcgagacgggaatttgctcactttttgactttccgttacgcaacagaaaaagttaaaaacgaaaagactaaaatcacacgtcttgtgaccttctaaattgattcacatgctaaatctgataagttttaatttcaatggtaggtttatttcttagctttcgctagtaaactgataatcagacaaaatggtgacatgagggacattgtggaccctgtattctctatcggtatcagtagtttatgggatgagctgcgacatatgccagcaggcggcgtctggtggtttaacgtcgatcgccatgaagatgctatcagtctggcgaatcaaacaattgcatcccaggctgaaaccgcacacgtcgcggtcattagcatggacagcgatccggcgaaaatctttcaattagatgattctcaagggccggaaaaaataaaattatttagtatgctaaatcatgaaaaaggtctatactatttgacccgtgatttgcagtgttctattgatccccataattacctttttattcttgtttgcgcaaataacgcatggcaaaacattcctgccgagcggcttcgcagttggttggataaaatgaataaatggagcaggttaaaccattgtagccttttggtaattaatcccggaaataataacgataaacaatttagtttgttgcttgaggaataccgtagtctttttggtcttgccagtttgcgttttcagggtgaccaacatttgctggatattgccttctggtgcaacgaaaaaggggtcagcgcccgtcagcagcttagcgttcagcaacaaaatggtatctggacattagttcaaagcgaagaggcggagatccaaccacgcagcgacgaaaaacgcattctgagtaatgttgctgtactggaaggtgcgccgccgctaagcgaacactggcaactgttcaacaataacgaagtcctgttcaatgaagcccgtaccgctcaggcggcgacggtggtcttttctttacagcaaaatgcgcaaatcgagccactggcccgcagcattcataccctgcgtcgccagcgcggtagtgcgatgaaaatcctcgtgcgggaaaataccgctagcctgcgcgccaccgatgaacgtttgttattggcctgcggtgcaaatatggttattccgtggaatgcgccactctcccgttgtctgacgatgatcgaaagcgtgcaagggcagaagtttagtcgctatgtgccggaagatatcactaccttgctgagtatgacccagccgctcaaactgcgtggtttccagaagtgggatgtgttctgtaatgccgtcaacaacatgatgaataaccctctattacctgcccacggtaaaggcgttctggttgccctacgtccggtaccgggtatccgcgttgaacaagccctgacgctgtgtcgccctaaccgtaccggcgatatcatgaccattggcggtaatcggctggtgctgtttctcagtttctgtcggattaacgatctggataccgcgttgaatcatattttcccattgcctactggcgacattttcagtaaccgtatggtctggtttgaagatgatcaaatcagtgccgagctggtgcagatgcgcttgcttgccccagaacaatggggcatgccgctgcctttaacgcaaagttctaaaccggtcatcaatgccgagcacgatggtcgccactggcgacgaataccagaacccatgcgactgttagatgatgctgtggagcgcagtagttgatataagatgctgtggagcgctcatcatgatgaccatcagcgatatcattgaaattattgtcgtttgcgcactgatatttttcccgctgggctatctggcgcggcactctttgcgacgcattcgcgacaccttacgtttgttctttgctaaacctcgttatgttaaaccggccgggacgttacgccgcacggaaaaagccagggcaaccaaaaaatgactcaatttacgcaaaataccgccatgccttcttccctctggcaatactggcgcggcctttccggctggaacttctattttctggttaagttcggcctgttgtgggcgggatatcttaacttccatccgctcctcaatttggtgtttgccgcgtttctgctgatgccccttccgcgctacagcctgcatcgcttgcgccactggattgccctgccgatcggctttgctttgttctggcatgacacctggttgcctggcccggaaagcataatgagccagggtagccaggtggcggggttcagtaccgattatttaatcgaccttgtcacacgctttattaactggcagatgattggggccatttttgttttattagtggcctggttattcctgagtcaatggattcgcattaccgtttttgtggttgccatactgctatggctgaacgtacttaccctggcgggaccaagtttctccttgtggccagccggacaaccgacgaccactgtaacaacgacgggtggtaacgcagcggcaaccgttgcggcgacgggtggcgcaccggtagtgggtgatatgcccgcacaaactgcaccgccaacaacggcgaaccttaacgcctggctgaataatttctataacgcggaggcgaaacgtaaaagcaccttcccgtctagcctgcccgctgatgctcagccatttgaactactggtgattaacatctgtagcctttcctggagcgatatagaagccgccgggttgatgagccatccactgtggagccatttcgatattgagttcaagaactttaactccgccacctcctacagtggcccggcggcgatccgtttactgcgcgccagctgcgggcagactagccacactaatctgtatcaaccggcaaataacgactgctatctgtttgataaccttagcaaactgggctttacccagcacctgatgatgggacataacggccagttcggcggttttttgaaagaagttcgcgaaaatggcggcatgcagagcgaattgatggatcaaacaaatctgccggttattttgctgggctttgatggtagcccggtttatgacgataccgctgtgcttaaccgctggctggacgttaccgaaaaagataaaaacagccgtagtgccacgttctacaacacgcttccactgcatgacggcaaccattatccgggggtcagcaaaacagcggattacaaagcgcgggcgcagaaattctttgatgaactggacgccttctttactgaacttgagaaaagcggtcgtaaagtgatggtggtcgtggtgccggaacacggcggcgcgctgaagggcgacagaatgcaggtatctggcctacgtgatatccctagcccgtctatcaccgacgtccccgttggggtgaaattcttcggcatgaaggcaccgcatcagggggcaccgattgtcatcgaacaaccgagcagcttcctggctatctccgatctggtggttcgcgttctcgatggcaagattttcaccgaagacaatgttgactggaaaaaactcaccagtgggttgccacaaacagcaccggtctccgagaacagtaatgcagtagttattcaataccaggataaaccgtacgttcgcctgaacggcggcgactgggtgccttacccgcagtaagaacgaaaaaggccgcagagtttcccccctgcggcctggtccgggcgcaaattgccattacggcagcctgacgcccgcatgacacgttacttccgcttgttcagccagttcacgatcatactggcaagaatgccagcaatgaccggagccgctaaatcatgccagaaggccatgcccagctctgcgaacgtcatatagccgcctgtgttgtaatgacaacgtttcgcggctattcttgagtggtctagagtcaagattagcccccgtggtgttgtcaggtgcatacctgcaacgtgcgggggttttctctctccagcaaccaatgccaccagggataaagcccccgcaacattgcgcctcaccggaacctttccggcttgccgctgattctacgattgctttttactgtcagcacccggcaatcttcctcattgcgcgatgccttccagcttaatttctttatttgcaatagttgcagttcatatccgggctgactccagactggtagtgaaatgcgcaattttgtagaattgcgcctcctcgcgacctccccagtgaatctgttgcctcattttttacatactgcgtattcgacttctccacctgttgcgcaagagaaactgggtttattcatttttgcgaggccgacttctttctggacaggactttatgcagcacaacacactaagcaaacacaatcagaaattgccgtttacacgctacgacttcggctgggttttattatgcataggcatggcgattggtgccggaaccgtgctgatgccagtacaaattggcttgaagggaatttgggtatttattaccgcagcgatcattgcttatcctgccacctgggtagtgcaggacatttatttaaaaaccctttctgaaagcgattcctgtaatgactacaccgatattatcagtcattacctggggaagaactggggaattttcctcggggttatctactttttgatgattatccacgggatttttatctactctctctccgtggttttcgacagcgccagctacctgaaaaccttcggtttaaccgatgccgatcttagtcaatctctactttataaagtcgctattttcgccgtactggtggcgattgcgtctggtggtgaacgattactgtttaagatttccgggccaatggtggtggtcaaagtagggattattgtcgtgttcggttttgcgatgatcccgcactggaatttcgccaatataaccgccttcccgcaagcctccgtctttttccgcgatgtcttgcttaccattccattttgcttcttttctgcagtatttattcaggtacttaacccaatgaatattgcctatcgtaaacgggaagcggataaagtactggcaacccggctcgcgctgcgtacccaccgaattagttatatcacgctcatcgcggtgatcctgttttttgcctttagctttaccttcagtattagccacgaagaagccgtttctgcctttgaacaaaatatcagtgcactggcgctggccgcgcaggtgatccctgggcatatcattcatatcacctctacggtgcttaatatctttgccgtactgaccgcattctttggcatttatctcggtttccacgaggccattaaaggcattattctcaatctgttaagccgaattattgataccaagaaaattaacagtcgcgtgctgactctggcgatctgcgcttttatcgtcattacgttgacgatttgggttagctttcgtgtaagcgtgctggtgttctttcagttgggaagcccgttatatggtattgtgagctgcctcattccgtttttcctgatctataaagtcgcacaactggaaaaacttcgcggatttaaagcctggctgattctgctgtacggcattttgctatgcttgagcccactgttgaagctgattgagtaaaccggagcgcatggccccggttttgtgagttaacgctgcggattttcatcctgatcaacagcaaaacaagctaccagttgaccgccgtagtcttttagctgcggctgcaactgggtgcaggggccgaagcgccgacgacagcgggcgttgaaggcgcaacccggcggtggattcagtgggcttggtagttcaccgctgagcttgatgcgctcgcggcgatcgtccgggttcaggcgcggcgtcgcggaaagtagcgcctgagtgtacggatggcgcgggttattgaagatttggtctttcgttcccttctccacgcagcggcccaggtacatcaccatcacttcatcagcaatgtgctccaccacgctcaggtcgtgggagataaagacataagacagccccaactcctgctgcaaatccatcatcagattcagcacctgcgcgcgcacactaacatccagcgcggaaaccggttcatcggcaatcaccacatccgggtcgagcatcagaccacgggcgatggcgatacgctgacgctgaccgccggagaacatatgcggatagcggtcatagtgctcggttttcaggccgactttcgccatcatgctcagggctttttcccgacgctgttctttgcttaagctggtgttgatcagcagcggctcttcaagaatttgcccgacttttttacgcggattcaggctaccgtaagggttctggaagacgatctggattttctgccgacgcagcttctgcgcctgcggatcgtgcttaagcagatcctgcccctggtaatacagctcgccaccggtgggcatttcaatcatcgtcagcaaccgaccgagggtgcttttaccgcagccagattcgcccactactgccagcgttttgccacgttcaaggttaaagctaacgccatccagcgctttaaccagacgttccggcgcgaacatgcctttcttcaccggataatgttttttcaggtcgatagcctgcaacagcggttgttgcagggtggcctcttgcgtactcatagtgtcggcctcccggcatcatcaagtgggtaatggcatttggactgacgcccgtcagcgagcatattcagcgccggttcttcagcgcgacatctgtcagtggcataggggcagcgcgggttaagcaggcagccgttcgggcggtcgtacttgccgggaacgacacctggcaagctcgccagacgttctttgtcctgagcaaattctggcagcgcacgcagcaatgcctgagtatacgggtgacgcggcgcatggaagatggcgtgcgcatcaccggtttccaccacctggcctgcatacatcacgatgattttatgtgccgcttccgccaccagcgccaggtcatgggtaattaacaccagcgccatgttctctttctgctgtagctccagcagtagttcgatgatttgcgcctgaatggtcacgtccagcgcggtggtcggttcatcggcaatcagcagttttggccgacaggcaatcgccatggcgatcatcacgcgctggctcatgccgccggaaagctgatgcgggtaaacatccagacggcttgccggatcgggaataccgacctgattcagcaggtcaatcgctcgctgacggcgggtacttttgttgccgccctgatgcaccttaatcgcttccataatctggaaacccacggtgtagcacgggttaaggctggtcatcgggtcctggaagatcatcgccacttcggcacccaccaggttgcggcgctctttttcactgatacgctgcaaatcctggccgttaaactccagtttttctgccattacgcggcccggataatcaatcagccccataatcgccagactactgacgctcttaccggagccggactcacccacaatcccgaccacttcgccctgttttacgctgtagctgatgcggtctacggcgcggaacggcgcgctttcgtcgccgaaatgcacgcttaatttatctacatttaataacgccatctcgaacctcttactgcttcagtttgggatcgagcgcgtcacgcagaccgtcacccatcaggttaaatgccagcaccgtcagcaggatcgccagacccgggaaggtcacgacccaccaggcgctttgcgcgaactgcaacacgtcggagagcatggtgccccactcaggcgttggcggctgtgcccccatgccgaggaaaccaagagcagccatatcgagaatggcgttagagaaaccgaggctcgcctgaacaatcagcggcgcaaggcagttcgggaagatgttaataaacatctgacgcatcgccccggcacccgccacgcgagacgcggtgacgtaatcgcggttaacttccaccagcacggcggcgcgggttaagcgcacatagtgcggcaaggcaacgaaggtcagtgccagcgcggcgttaccaatgctcgggccgaaaattgccaccagcaccagcgccagcagcagacttggcagcgccagcatgatatcgaccacgcgcataatgatgttatcgaccaggccgccaaagtaaccggcgatcaggccgagaataacgcccataatcaggcttaacacaactaccagacagccaaccagcaggctcaggcgcgcaccgtacatcaggcggctcagcacatcacggcctacgtcatcggtgcccagcaagtgcgccatgctgccgccttcctgccaggctggcggggcgagcagtgcatcgcggaactgttccgccgggttatagggtgcaatccagttggcaaagatcgcgatgaacagcacgatgacgacgtaaaccagcccgacgaccgcgcctttgttgcgtttaaaatagtgccagaactcctgtaacggggtcatcggcaccggtgcgctaatcactttattttcagtaacctgactcatgatgtccccttacttcttatgacgaatacgcgggttcaccacgccgtacagcagatcgaccagcaagttgacgaggataatcatcgtcgccaccagcaatacgccgccctgcactaccggatagtcgcggcgttgcagtgcgtcaatcaaccagcgtcccagaccgggccagctgaagatggtttcggtcagaatcgcccccgccagcaatgttcccacctgcaggccgataacggtcaccaccggcagcatcgcgttacgcagcgcatggacgataatcacccgcatgcgggttagccctttggcgcgcgcggtgcggatgtaatcctcgcccagcacttccagcatgctggagcgtgtcatacgcacaatgaccgccagcggaatagtacccagcacaatggcaggcaagatcatatgggcgacggcatcgataaagttgccgtcttcaccccagatggcggtgtcgattagcataaaaccggttaacggattggagtcatcgaggaacaccatatcgctcacgcgaccggagacgggcgtcaggttccagtgcacgctaaccagcatgatcagcatcatgccccaccagaagataggcatactataacctgtcagcgccaggccaaccgctgtgtgatcgaaaatggaaccgcgtttaaccgcagccagcacgccgaccggaataccgactgccgtagcaaaaatcatcgcgcagacgccaagttccagcgtggcctggaagcgcggcacgaactcttcccaaaccgggatgcggcttttcatactaatgcctagatcgccatgcataacgccccaaatgtaatggagatactgctgccacatcggtttatctaagccgagttcagccagcagctgcgcgtgacgctctggggagatcccacgttcgcccgccatgatcatcaccggatcgcccgggatcatgtggacaaaggcaaatgtgagaagggtaataccgataaacgtggggatgacgagtcccaaacgtcggagaataaactgcaacataacccggattctctatagtgacccgcagcctggaactgcgtgtctgtattgctcacaaatcaattcccgcccttatcggacagggaatgaagtattgctgccggatggcgctgcacgcagaggcacagcgccaccgggtatacagattgttgacaaagtgcgctttgtttatgccggatgcggcgttaacgccttatccggcctacaaaatcgtgcaaattcaatacattgcagaattttcgtaggcctgataagcggagcgcatcaggcatttttgcctttgccatcagtcttgtatggcttttaattattcgatagagacgttttcgaagtgatgtttgcctaatggatcaaccacatagcctttaacttctttacgtaccggttcaaacacggtggagtgagcgatgatcagtgccggagcctgatcgtgcatcaccacctgcgcttgtttgtacagttcaacgcgtttattgtggtcgtcggtagcacgcgccggttgaatcagatcttcaaacggtttgtagcaccatttactgtagttggagccttgttcagaggcggcgcagctgaacagggtggcgaagaagttatccggatccccgttatcgccagtccagcccatcattaccgtctggtgctcgccatctttcgcacgcttgaggtactcaccccattcgtaggtgacaattttggcctgcacgccgactttcgcccagtctgcctgaatcatctccgccatgcggcgagcgttcgggttatacggacgttgtaccggcatcgcccacaggtcgatggagaaacctttttccagacccgcttctttcagcaaggctttcgctttttcaggatcgtaggtgtagtcctgaacgtcgtcgttatagccccacatggttggcgggatcaggtttttcgcacttacgcccgcgccctgataaaccgctttgatgatcgcgtctttgttcaccgcgtaggtcagagcctggcgaactttcacgtcatcgagtggttttttctgcacgttatagctgagataaccgacgttcagccccggcatttccatcagattgatggatttatcctgcttcatgcgagcgatatctgccgggttcgggtacggcatcacctggcattcattcttctgcaatttcgcgtaacgcacggaagcgtcaggggtaatagagaaaaccagcgtatcgatctgcggtttggtgccccagtagccatcaaacgctttgtagcggatacgggaatctttttgatactgctgtaactggaacggaccggttccgattgggttgaggtccagtttttccggtgtaccggctttcatcatcgcatcagcatattctttactcagaatagaggcgaagtccattgccaggtcagcgaggaacggcgcttccgggcgagtcagcacaaactgaacggtgttgtcgtccacctttttcacttcactgatcagctctggcaagcccatgccttcgaagtattcgtagctgccgccagaaactttatggtacgggttttgcgcgtttttctgacgatcgaagctgaacaccacatcatcggcgttcagttcacgcgtcggtttgaattctttattgtcgtgccacttcacacctttacgcagatggaaggtataggttttaccgtcttcgctgacttcccacttttcagcgaggcccgggatcacttcggtggtgccgattttaaattcaaccagacggttataaagcgggacggaagaggcgtcataggtggtgccggaggtaaacagctgcgggttaaacccttccggagatccttcactgcaataaaccagagttttagcctgaacacttgctgcgacggtcatagccaccaggctgagaccaagcttcagcatcccactctttttcaaggaaatacgcattattctgctccaattgtgatgtttgttgttttaaccctttgcagtgggttgtcgctgcctgaccttttttgttttttgcccggtcgggtcaacgttatgaggtggggatgccgtactaattaacatcagtgtaacagtgcggatcctccataaaatgcccctcgtgacctacaatctgtcaacagaatgtgaaaacgtcaatacagccaaccgggatttacaccaacggtgagaatccacacacaaagattaaaaaaacttcaaacagctatttgcagcagagaaatttgtgctactccaacatgaccagaacaatcagcttaatatttagcaacatttggtgattaagttttatgcatttaatgaaaaaaatctgaggaaaaggtggatatctgagcgattaataccatgaacgctaaaacgcacagcggaaaatgccagggccagccataagtaacgcaaaaaaagatttaagcaaatataaaaaaagacaatggtttctgtcacaaatccgttaatggatagtgagatatggggcgcaaatttggcagggaaatgtgtgtcgtgtaggtcgaataaggcggtcgcgccgcatccgacaatggccggcacatttgcctgatgcgacgctgacgcgtcttatcaggcctacgtcgagtcgaacctccctgcccccggaggttctcatcctcatgagctgcagatgcaaaaaagcctgctcgttgagcaggcttttcgaatttggtcggtgatagaggattactcgccacttcgtggctcgccctgcgggccgttgctggcgcaacgttctctcgcttcgctcgagtcgaacctccctgcccccggaggttctcatcctcatgagctgcagatgcaaaaaagcctgctcgttgagcaggcttttcgaatttggtcggtgatagaggattcgaacctccgaccccttcgtcccgaacgaagtgcgctaccaggctgcgccaatcaccgaatgcggggcgcatcttactgcgcagatacgccctcgtcaatcccttaatagcaaaatgccttttgatcggcgagaaagtcagcaggccgcttagttagccgctgcctcttttgcctgcgggatgtgacaccagttgttgttttcgttaattccaccatccggactagtatagccaagacaacccatgatggtatcgtacagctctacgtgacggcgtggcactttcatgtcggcttcttttttcagctgcgcaaacgcctgcgcattggccggattttccagatatttatcactcatccagaccatcatcggtacgcggaactgctccggcggtgccagttcacgcggcgtgccgtgcaggtgctcgcgttcattaatactctcaccgtggtcagctgcgtagaacacaatcgctttcttatcgcgaacctgatcaatcacgctggagataaagtgatccacataggtcacgctgttgtcataggagttgatcatctgcgctttggtacagccgctatcaacaccaatacattccggcttccactgcgcgaagctacgcggataacgctgggtgtagttaaaatggctacctttggtatgcagaatgatcagatgcttaccatccgggttgcgccctaggctttgctgcatttcgtctaccagcaacatatcatctaccggcttgccacgattacgtggctccgcaccaatctgctcacgataagcaatgttgtccgccatcgtgttgctgtagaaccacatttcgctctgcatagcgtagaggtcagaactgaatcctaactgcttcagaaccgcgaaaatgttctgttcttttaatgtgcgctgcggattatcttccgcgcccccctgacgtacaaacatgcaacgcagactgagtttggttgcggtatcacaggagtaaccacggaacgccgccagatttttctcctgggccagtttcggcgtggtattacgctcatagccgaaaatacccatatggtcccaacgcgtggtttcaccgatgataaacacgacataagtgtcatcaacgttttgcggtgcctgataagtgaatttcttcgccggattaagcaaactattattatcggaagattcatcgacccgcgcccaggcatacagccccaacgcagaaagccagttacttggcagataagagttcgctacgacaccgccataactcggcaaatcaacgccggtcgccctctccactttcttctgctggatatccagcaaacgaatcggtgcccaaaccataatacccgccagtacgacgaccgccaggctgcgaatacgctgccctggggttcgcagttgtcggagcaaggtgtagcgacagcggttattccagataaggataagaggcaatgcactaacggcgattaaccagagaataaagttcagaccaacaacttctttactcaggtcgatatcggtggtcatgacggaagcgatgatgccataaccaatgaccacattaaggaaggtcatgtaatagctggcacctgcggaaaagagcaccaccaggcttgccagaatacgccagctgcggcggccaaacaggctaagaagacgtagtaaaaagaaggtcaccagtacggtggcggccagttcaacaacagcagaaatgcctttccagacggtaaaatcgtgcgcatagctgccgaagcggcggtaaaaaaccgcgccattcataaaaaggccaatatagattgcaagcaaaaagctcagcttctgctgtgtaatgcttttgatgtatctcatgcaaacaaaccctggacaaacaggtgataacaccctgcttagtggcttttcaggcccggcagggaaaaagtgcggaggtagtcagataagtaaaatctacacgcgcgaataagtagaccacagcaaagggaaaaagtgtggggaaagagtgtgcatgaagcacaaatttacaaaaatgcaagtttgaaaagagactttagcgttacaaaaagcagtaaaaagggccagttaattggcccaaattttacgagtcattgtttatacatttcgttgatgcgtttgatgcacacggaagctgaagcccagtagctcgcggctgagcattaaagggagccatgcgcctcacgcaacattttctgctctggctgacgaatcgtcgtagaaagcgccaaactcagaatcagcagggcgaaaatcacgtagaaggtcacatagaagccgccaaacagactggcgataatgctaccacaaatgctaccgataccgaaaccgagataaatcacaccgtagtttttcgccaggttattgaggccaaagaactcactgaccagactcggaaagacggtaatagtgccgccaaagttaaatgccacgcaggcaatcgctgcaaagaacgtcactgcattcaatggtgcaaacagcagggccgccatacccaccaggcttatcacctgaccaatggtaataacacggatacgggcgattttgtcagacagaatacccagcaccagacgaccactaaggttggcgatggaaataacagtgactgcattggctgcggaaaccacatcaaggtgtgccagactttgggcgatatctttcgctaccccaatcacgtacaggccgctcatgcaggcggtcaggaacattaccgctaacatccagtactgcggtttacgcatgctctctgccagcgtgtaatctttctccaccacaccattgctggttttcacttcctgttttggtgcgtctttcattaacgttgcgccgaaaacaatcatcaacagcgcaatcgctccccaaatcacaaaggttttttccagaccgaccgtttccagcagctgcgtgtcgataaatttgaaacccaggctacccagaccataagaaccgatagcgaacgcggagatcagacctttacgctccgggaaccacttcacacagttagagagcgtcagcagataacccgcgccatctgccagtcccaccagcacaccggcgcttaaccacagcatcatcaggttgtcagaatgcgctgtcaggaagaagcctaatcccagcaaaatgccggaagccatggtgacgcgtttaacgccaaaacgttcctgtaatttgcccgcaacagaagagctaattgccagccccagacttaacaagccgaaagagaaagcgacctggcttaccggcgcatccagcttggcggaaagcgcgccattaaacaggctccaggtataaacgctccccagcgcaaactgggtaatgatagtaccgatgagtgtcagccagcgggtacgctgataattactaggtgtcatggcagtattcctgcagtaataaaaaggaaaaatctctgccgacaaccataacgaagtgcactttatgcctggggaaaaacggcatgaaatgccatcagaacggaatgaaatgccttagttcaggaatgaatgacgcgacaattattcaccaaatttattatttggtaagttagcacccactatcgccacaactattgttatttaatggtttcaattgtgactgttacgttaaaatctggcgctaacccccatcgtatacagatagtcgctattattagtggtattttctgcctgagttagcgcggcataggcggcaatattttgattgagcaacatatcagcgcctacggtgacatccagccagttgccgttctggtttgtcgccgtcatccggctcaggccactttgcgccttccagatattctcgccaaattgctggttatagctgatttgcgcccagggtcggagatcgccaagccgggagtcaacacgccagcctaaggtactcacgctggcatgccataacggatcggtcagcgtggtagtactgtcgccaaactcgttatacatgctggtggttgtgccatcgtaatgtaatgccgcgaccgggccggttgtaacctgttcatataaaggaaaattccagcccatactcatactgctggtcacatccacaggggtttcttccgccagattgacttccagtcccagcgccctttggctactttgaatacgttggctcaaaatatcgttgtaatcaggttgatgatcactatcccaggtgtaacgctctgtggaaagtccgggttgcgtatcaacgatatattcttgttgccaggcgtaagctgtgttgagaaaaaaggcactgattaccacgctcgccagcaggcttagctgccagcgaccaccgcttttttttatgatcattaacacgactccagggaagagccgaattcggcaatattattgtcattgtatgaaggatatcgggcatagtagccctgtattaaatattgactttttcaccgatgcgtcaagaaaagcggctgaaatttttacgatcgggtacatagcgagggaaagtatggaacgttgcggctgggtgagtcaggacccgctttatattgcctaccatgataatgagtggggcgtgcctgaaactgacagtaaaaaactgttcgaaatgatctgccttgaagggcagcaggctggattaagctggatcaccgtcctcaaaaaacgcgaaaactatcgcgcctgctttcatcagttcgatccggtgaaggtcgcagcaatgcaggaagaggatgtcgaaagactggtacaggacgccgggattatccgccatcgagggaaaattcaggcaattattggtaatgcgcgggcgtacctgcaaatggaacagaacggcgaaccgtttgtcgactttgtctggagctttgtaaatcatcagccacaggtgacacaagccacaacgttgagcgaaattcccacatctacgtccgcctccgacgccctatctaaggcactgaaaaaacgtggttttaagtttgtcggcaccacaatctgttactcctttatgcaggcatgtgggctggtgaatgatcatgtggttggctgctgttgctatccgggaaataaaccatgattcgggaagcgcaacgtagtgaactccccgcgatcctcgaactgtggctggaaagtacaacctgggggcatccctttataaaagcgaattactggcgtgactgcattccgctggtgcgggatgcctatcttgccaacgcgcaaaactgggtctgggaagaagacggtaagcttctcggttttgtcagcattatggaaggccgatttctggcagcgatgtttgtcgcaccgaaggccgtcaggcgcggtattggtaaggcgctgatgcagtatgtgcagcagcgccatccccacctgatgctggaggtttatcaaaaaaatcaaccggcgataaatttttaccaggcacagggttttcacattgtcgattgcgcatggcaggatgaaacccaactacccacatggattatgagctggccggtggttcaaacgctgtaattaactgctggccggtggttcaaacgctgtaagtgtcagttccggaccgttgtatttttccagccatgccagcgccgtattacccgcacagccattccccagccggctgctggggagatctttggtcagcacgttcactgcgccgtttttacaaataccgtcagcggttaaatccagatccggccatgccccttcgtgaatgcaaatcacgccaggtttaattccctcgctaatgaccgctccggcaagaatttgcccgcgtgcgttccacaaccgaacagtatcgccatcttgtatgccgcgctcctgggcatcgtcaggatgaatggtgacaggctcacgatttgccaccgcgtacaattcgcgcagagaactgtaattcagctggctgtgcaggcggtgcgccggatgggcagaaagtacctgcaactgttctggttcggcattgccctgccattcgtccggctccagccacattggatgcccagggcaatccgggtaaccgtaatcggcaatacgctgactgaagatttcaatcttgccgctggcggtttttaacggatgcgccagcggatcgcggcaaaaatcagcgaagcgaataaaccgctcgctgtccgggttttccggcatctcaattaactggttggcttgccagaactcagcaaatggcggcaattcaacctgctggcttgccccgcgctgtcgggcaacgttataaaacgtttccagccattgcagctcactttttccttccgtaaaacgtgcataaccgcccttctcccagcgttcacttaactcggcaaaaacatcaaaatcattacgcgcttcatagcgtggcggcaccacttgcttcatcggcaccagatgctgattactgtaatcaccggtcatggtgagatcattacgctcaaaagaggtagtcgcaggcagaacgatatccgcgtgttttgccgccgccgtccagaagcattcagagatcaccaccagctccggtttttgccaggcacggatcaggcgattggtatcctgatgatgagtaaagttggcaccgcccgcccaccagataaaacgaatatccgggaaatgtcggttcataccgttgtgttgatatgcgccaccagggttttccagtgcttcaacaatgcgggcaacagggattttatccaccgcatcgcagccacccggcaagctgccctgcatggaagagagcaccgcagaacgccgcgtggggttaccaccattggcaaaatggtaagaaagaccaaaaccgccgccgggtgtgccgatttgccccaacattgctgccagcgtgacgatcatccagtgtttttgctcaccaaactgttggcgctgcattccccagcctgccatcagcatggtggtattttggtggaaaatagccgccagctcgcggattttcgctgcgccaacaccacaaatctctgctgcccattcggcggttttcgctattccgtcactctcgcccagcaaataagaggcgaagacggcataacctgtggtgcaacgcgccagaaacgcttcgtcgtgccaaccattttccaccagcgtatgggcgatccccagcatcagcgcaacatcggtgcccatgtgcggtgccacccactccattttatcgccaaagaaatcgacggtttcgcttcgcattggatcaatgcagatcagctttttcccgctgtcacgcagtgcagaaaagtaagaaagcccctgctcatcggatgcattccacgcaattttcagcgtattgagtgggttagcactccacagcaccacgacatcgctatgttccagcaccagcggccaactggtctgctgttgataaacttcactaccacccacgacatacggcatgatcgcctgtgccgcgccggtgctataatcccccagatgcccggtataaccgcctgccagcgccatatagcgttgtaataatgtgctggccttatgcagcacgccgttactacgccagccgtaggaaccagcaaaaatgcttgccggaccataagcctcacgaatgcgtttatgttgttggtgaataagatccagcgcctcatcccaactcacgcgaacaaattcatcctgcccacgaatgccttgcgggttttccggactcgcaagaaagccttttcgcaccattggaaatcgtacccgcgtattgctgtgaacctggtcgcgaaccgcgctctgcaaggagttttccattcctgtggctaacgcgccacggctgctaaacacggtttcgccgtcggtttcaaccagcatgggcccccaatgggcggcagtcagaacggaatatcgtgaggatgagttggccaaaccgaagactcctgaaaggttagatgtattgagcagttaaatattacttacaaatttccgagtattcccaggaataatcttcatgttcacgcggcataatctcccgccacggaacccgtggcaaagaataaaaaggttattaaggattaacaatgaagaaacgtgtttatcttattgccgccgtagtgagtggcgctctggcggtatctggctgcacaactaacccttacaccggcgaacgcgaagcaggtaaatctgctatcggcgcaggtctgggctctctcgtgggcgcgggtattggtgcgctctcttctagcaagaaagatcgcggtaaaggcgcgctgattggcgcagcagcaggcgcagctctgggcggcggcgttggttattacatggatgtgcaggaagcgaagctgcgcgacaaaatgcgcggcactggtgttagcgtaacccgcagcggggataacattatcctcaatatgccgaacaatgtgaccttcgacagcagcagcgcgaccctgaaaccggcgggcgctaacaccctgaccggcgtggcaatggtactgaaagagtatccgaaaacggcggttaacgtgattggttataccgacagcacgggtggtcacgacctgaacatgcgtctctcccagcaacgtgcggattccgttgccagcgcgttgatcacccagggcgtggacgccagccgcatccgtactcagggccttggcccggctaacccaatcgccagcaacagcaccgcagaaggtaaggcgcaaaaccgccgtgtagaaattaccttaagcccgctgtaatccctttcatgccaggtgatgcagaaatcacctggcattcttcagttttccttcatcatatttcaggctaaggtgatcgccttatcagtgaatggagagaagcatgaagccgtccgttatcctctacaaagccttacctgatgatttactgcaacgcctgcaagagcatttcaccgttcaccaggtggcaaacctcagcccacaaaccgtcgaacaaaatgcagcaatttttgccgaagctgaaggtttactgggtagtaacgagaatgtaaatgccgcattgctggaaaaaatgccgaaactgcgtgccacaagtacgatctccgtcggctatgacaattttgatgtcgatgcgcttaccgcccgaaaaattctgctgatgcacacgccaaccgtattaacagaaaccgtcgccgatacgctgatggcgctggtgttgtctaccgctcgtcgggttgtggaggtagcagaacgggtaaaagcaggcgaatggaccgcgagcataggcccggactggtacggcactgacgttcaccataaaacactgggcattgtcgggatgggacggatcggcatggcgctggcacaacgtgcgcactttggcttcaacatgcccatcctctataacgcgcgccgccaccataaagaagcagaagaacgcttcaacgcccgctactgcgatttggatactctgttacaagagagtgatttcgtttgcctgatcctgccgttaactgatgagacgcatcatctgtttggcgcagaacaattcgccaaaatgaaatcctccgccattttcattaatgccggatgtggcccggtggttgacgaaaatgcactgatcgcagcattgcagaaaggcgaaattcacgctgccgggctggatgtcttcgaacaagagccactgtccgtagatagcccgttgctcagtatggccaacgtcgtcgcagtaccgcatattggatctgccacccatgagacgcgttatggcatggccgcctgtgccgtggataatttgattgatgcgttacaaggaaaggttgagaagaactgtgtgaatccgcacgtcgcggactaagccgcgactgcgtagagtaaagcccgataatcgctcgggcttttactctttattgggttgcagtaactgctgtagtccaggcctgattaaacgcctgatgctgtgccggtaatggcgcaatcagtttgttatattcacttgcctgctgactagtcgggaactggatgccatttgcgacaaagctcacctgagtaccttgctgagcaatgtagtctccaaccatcaccagttgttgcgtgaaagtttgtgccgccggaatcaacggttgcaatgcatcagctggcgtcgttaccactttggtgaatgcctgatcaaagaccggtttcaaatcatcgctctgttttagcgcagagtgcgcagcatcggcctgcaacttcgcattttgcagttgttgcgccagcacacccaggctaccgttcatttcacgcagcggaccgctttgcgtaacgtaatcctgcggtacgcgaattgcgttaacgctgtctacaaccgggcgcagaccggaatccatcgcctgattcacctgctgagaataaccatacagaatcgcgtaatcagagacaaaaggaccaaactgttttttctgatcggcagtcagggttggtagacgttcaccgctacgcatcactgtattctgcaggaagtcgataaacgctttacgctgatcgccttctttatcaaaacacccactcaggctaactaccattaataacgccgcaagaggcgcaaaccagcgagagcaggactttcctgtcgccattttcttactcctttcacccaaaaaaagcgcacaacgacacacgcgtgtctgacgtgacaaggatagtccaggacaggcttgcaggataccctttctacgtaatcttcctggtaaaatcatggagaaaatgaaacaaggttaatttgttgtttcattgttaaaaaatgatagtgccgttgccttttttgtagccagagatttacgccttcgcagaaggttagattttcgaaatctttacaaaacaggagtggtaagagatatatcggcatttatcagatcgttaggtggctataagtcacgctaaatgacaggctgaatcgaatcatagccagagcatgccctgacttcaccccgctgtgtctgcttttcccgactattcttaatgagcttcgatgcaattcacgatcccgcagtgtgatttgaggagttttcaatggaatataaagatccaatgcatgagctgttgagcagcctggaacagattgtttttaaagatgaaacgcagaaaattaccctgacgcacagaacaacgtcctgtaccgaaattgagcagttacgaaaagggacaggattaaaaatcgatgatttcgcccgggttttgggcgtaagtgtcgccatggtaaaggaatgggaatccagacgcgtgaagcctagtagtgccgaactaaaattgatgcgtttgattcaagccaacccggcattaagtaagcagttgatggaataaacttttatccactttattgctgtttacggtcctgatgacaggaccgttttccaaccgattaatcataaatatgaaaaataattgttgcatcacccgccaatgcgtggcttaatgcacatcaacggtttgacgtacagaccattaaagcagtgtagtaaggcaagtcccttcaagagttatcgttgatacccctcgtagtgcacattcctttaacgcttcaaaatctgtaaagcacgccatatcgccgaaaggcacacttaattattaaaggtaatacactatgtccggtaaaatgactggtatcgtaaaatggttcaacgctgacaaaggcttcggcttcatcactcctgacgatggctctaaagatgtgttcgtacacttctctgctatccagaacgatggttacaaatctctggacgaaggtcagaaagtgtccttcaccatcgaaagcggcgctaaaggcccggcagctggtaacgtaaccagcctgtaatctctgcttaaaagcacagaatctaagatccctgccatttggcggggatttttttatttgttttcaggaaataaataatcgatcgcgtaataaaatctattattatttttgtgaagaataaatttgggtgcaatgagaatgcgcaacgccgtaagtaaggcgggaataatttcccgccgaagactcttactctttcaatttgcaggctaaaaacgccgccagctcataactctcctgtttaatatgcaattcacacagtgaatctcttatcatccaggtgaaaaataaaagcgtgaaacaaatcactattaaagaaagtaatctatatttctgcgcattcccagcctcctgtgttgatttccaacgagtataactttgatttatagtcaggtggggcttttctctgtctgcctttcggtgaatacctgagacaaacagtctcaagcacccgtggctattctagcttaataagtttgtttcttctccttgatataatcctaaaaaaatctcataaaattaatatatgagataatctttattcagcagaagattattaaaggttgctgtattatttagcgataaaaaaagcctgccagatggcaggctatttaataacggcgttattattgcaacaggctaatatccgcaacgcgcaggaacagttcgcgcagtttctccagcatggtcagacggttgatacgcaattctttgtcatcaaccatgaccatcactttatcgaagaaagcatcaaccggttcacgcagctcagccagttcgaccagcgcatcctggtaacgaccttccgtaaagtacggctccagcttgtcacgtagcaccacaacctgcatcgccagtttaatttcttccggctctttcagggtagaggcattcacgcggtcgctcagcacttcgtcagatttcgccagaatgttagatacacgtttgttcgccgccgccagtgcagcagctgcatccagggtacggaaatggcttaccgctttcatacgggcatcgaaatcagccggacgagtcggacgacgcgccagtaccgcctggatggtgtcaacggtataaccttcgtcctgataccaggcgcggaagcgaccgagcataaagtcgataacatcatcaactacgttggcattagtcagcttatcgccatacagacgcaccgcttcttcggtcagcgtttgcagatcaaggttgaggttcttctcaacgataattcgcagcacgccaagcgcggcacgacgcagcgcaaacgggtctttgtcgcctttcggatgctgaccgataccgaagatacccgccagggtatccatcttgtcagcaatcgccagcgcacaagctactgggttggacggcaggtcatcaccagcaaaacgcggctgatactgctcattcagcgccaccgcgacatcttccgcttcgccatcgtgacgcgcatagtgcatccccataacgccctgggtgtcggtgaactcgaagaccatgttggtcatcaggtcgcacttagacagcagacccgcacgggtagcgtggttaacgtcagcgccaatctgttcagcaatccagccagccagcgcctggatgcggtcagttttgtcgcgcagcgtccccaactgttgctggaacaacacggtttgcaggcgcggcaggttatcttcaagacgttttttacggtcggtgttgaagaagaactcggcatccgccagacgcggacgaacgactttctcgttaccggagataatctgctgcggatctttgctttcgatgttggcaacgaagataaagttcggcagcagtttgccgtcgttcgcatacaccgggaagtatttctggtcacctttcatggtgtaaaccagcgcttcagccggcaccgcgaggaatttctcttcgaattttgcggtcagaacgaccggccactccaccaggctagccacttcttccagcaggctttcgcttaagtcagcgttaccgccaatcttacgcgctgcttcttcggcatcggctttaatcttcgccttacgttcttcgtaatcggcgatgactttcccacgctcacgcagaatttccggatactgatcggcgttatcgatggtgaattccggctcgcccataaagcggtggccgcgaatcacgcgatcggactgaatgcccagaatggttgccggaatgactttgtcgcccagcagcagggtcacggtgtgcaccggacgcacgaagtgcacgtcgcttgcgccccaacgcatcagtttcgggatcggcagtttcgccagagaagtcgcaaccatattcggcagcagtgcttcggtgctttcgcccttcacatgggcgcgatacagcagccattcgcctttatcggtagtcagacgctcagcctggtcaacggtaataccgcaaccacgcgcccaaccttctgccgctttgctcggtttgccttcagcgtcgaacgcctgggcaatcgccgggccgcgtttttcgatttcacgatccggttgcgcttccgccaggttagctactttcagcgccagacgacgcggagcagcaaaccattgaacggtgccgtgtgcgaggccagcgttatccagctccgcagtaaagttcgcagcaaaggactcagccaggctgcgcagtgcttttggtggcagctcttcagtgccgatttccaccagaaaagttttctcagacatagccgcctcttacttatctttgttgcacatcgggaagccgagggcttcacgggaagcgtagtatgcttctgccactgctttggtcagggtgcgaatgcgcagaatgtagcgctgacgctcggtgacggagatggctttacgcgcatccagcaggttgaagctgtgggcggctttcagaatacgctcgtaggctggcagcggcagcggattttccagcgccagcagctgctgcgcttctttctcgtactgctcgaagcaggtgaacaggaagtccacatccgcgtattcgaagttgtaagtggactgctccacttcgttctgatggaacacgtcgccgtaggtggttttacccagcgggccgtcgctccagaccaggtcgtaaacgctgtctacgccctgaatgtacatggccagacgttccagaccgtaggtgatctcgccggtaaccggtttacactccagaccaccaacctgctggaagtaagtgaactgcgtcacttccatgccgttcagccacacttcccagcccagtccccaggcacccagcgtcgggttttcccagttatcttccacgaaacggatgtcgtgaatagtcgggtccatgcccagctctttcagagaaccgaggtacagctcctgaatattgtccgggcttggcttaatgaccacctggaactgatagtagtgctgtaaacggttggggttttcgccgtagcgaccatcggtcgggcgacgagaaggctgaacataagcagccgccatcggttctggccccagctcgcgcagacaggtcattgggtgagaggttcccgcgccgacttccatgtccaatggttgaacaatggtgcagccctggcgagcccagtaatcctgtaaggtcaggatcaagccctggaaggtcctggtatcaaacttttgcatattatttcgtgctggatacgtgtggatttaaaggaagggatcagtatacccgctggatggaagatatacagtacgaaacgggaaaaagcagggcttaacgcatggaaagatgcaaaaaatggccatccgcgtcaaaagaacagacaaactgctctttacggaaggtataaccgcgcatttcatagcttccctggaactgttcgaaggcggtgacgtcgattttttgctcgccggtgttataacgttttgccgcctgatccttgcataacgcttccatattcaagctacgcagaggatcaacctttacccgttgtgctttctgcacgggactcggtatagaacaacccactagcaccataagcgccattgccggaaagaaagcgttcatcatcattaaattaccgtctggtttgcaggtgagtcttattatttatatcggtatagtggctgatatcttacgaatttccttaagcctctataagctgtagtgataaaactcagattattccagtgcgccaaccaaatgatttatcggtcagactttttttaaccagatacagagacacagatgcagcccaaaatttactggattgataacctgcgagggatagcgtgtttaatggtggtgatgattcacaccactacctggtatgtgaccaatgctcatagtgttagccccgtcacatgggatatcgccaatgttctgaattctgcctctcgtgtcagcgtgccgctatttttcatgatttccggctatctcttttttggcgaacgcagcgcccagccgcgccatttcttgcgtatcggcttatgtctgattttttatagcgcaatcgcactgctctacattgcgctgtttacctccatcaatatggagttagcgctgaaaaacctgctgcaaaagccagtgttttaccacttgtggtttttcttcgcgattgcggtgatttatctggttagtccgctgattcaggtgaagaacgtcggcggaaaaatgttgctggtgctaatggcggtgattggcattatcgctaacccaaacacagtgccgcagaaaattgacggttttgaatggctgccaattaacttatatatcaatggcgatactttttactacattctgtatggcatgttgggccgcgctatagggatgatggacacacagcataaagcactgagctgggtgagcgccgcgctgtttgcgacgggggtttttattatctctcgcgggacattatatgaattgcagtggcgcggaaattttgccgatacctggtatctttactgtgggccgatggtttttatctgcgcaatcgcgctattgactctggttaaaaacacgctggatacgcgtaccattcgcggacttggcttaatctcccgccatagtttgggtatatacggattccacgccttgattatccatgcgctgcgcacccggggaattgagcttaaaaattggccaatactggatattatttggatcttttgcgcgacgttggcagcgagtttgttactttctatgctggtacaacgaatcgacagaaacagattagtgagttaagtaaaagcccggtcacattggactgaccgggcttacgtgagttattcgctgtattcttcctgggtaacctgtgtttcttttggtgggtttattccggcatcacgaatatttttctgcaccgctactgcaccaaacaagcttaagaagaaagccagtccataaaaacctttttcgctgagtaataatgtcgcattccacagacctaccatcagtaatgcaacagagataataaagacagtcaggcaggtcatataataaatggaagtggtcggtatgccttcatacttgtcccgaacggtcttttgataagacgccgcagaaaacagtcctaataccagtacggcaaaataatatcctttttcatttaactgcatctctgcattccatagccctaacagataggtaacgataccaccaacgagagctatccaactcacaatactaaaggccggactataggtacttattttgttgtccatcacagtattcctttcattcctgaatatgtaagagctttatgttgctcatgcgctgcgaaacaaacgcatttgaccaaacaagcagacaaaaaaggcgatgggatagatcaccatttcataagtattgataggtgcgtttaaaacaccgataaacaagagaccgatagtgattaacgcaactaactggcagatatgggtaaaaaaatcatccagttgcccgagtttttctgcgcgaagatatgcatagttgccaaaagttgctgtcattaacacgccaagaaaatagccttttccacttaacaatgggcaactgatccatagcccaaccagataaaccagcgccccgacaacaaataatagtttcgccacagtcttactggttttcataacgatctccatatctaccagcgatacattacgagtaaccaacgaaagacaaaactgaaaaatgccattaacaaatgattttcagaataaattcatactaaatattaattaattactgagatatatagatgtgaattatcccccacccggtcaggcaggggataacgtttacgccattaatggcagaagttgctgatagaggcgacggaacgtttctcgtcgtggctgataagcggcataacgctgcgcatctggtagatggctctgttctaacggtagttgcggcaacaattcaatgaggcttttctctggattcgccgcgatctgcgccagccttgctgcgcccagtgctggccccacatccccccccgtacggtaatcgagctgctgaccgctgatatccgccagcatctgacgccagtactcactacgcgccccgcccccaatcaacgtaacactttgcggtttaataccgcaggcatgcacgacatccatgccatctgccagcgcataacccacgccttccagcactgctcgcgccagttcattggggccatgttgatgagtcaaaccaaagaaaacccccttcgcctggggattattgtgtggcgtacgctcgccggaaagataaggcagaaaccaaactggctcggcactttcatcagcctgttgagctgcagcgattaaagctgggacattgctcaggccggttaatttcgcggcccaatccagacagctcgctgcactcagcatcacagacattaaatgccaacgttgcggtagcgcatggcaaaagctatgtacggcgctttctggcttgcttaagaacccttcgctgacagcaaaatagaccccgctcgtccccaggcttaacattgcctgattagcatcaaccattcccacaccaactgcaccagctgcattgtcgccaccgcctgcgacaactggcaccgtcgccataccccacgctttcgcaacttcaggtaacaaagcaccagtaatttcgctgccttcgtataatgcgggcatctggtcacgagataagtcgcaagcctgcagcatgacgtcactccagtcacgctttgcgacatccagccacatggtgccagctgcgtcagacatatcgctggcaaactcccccgtcatacgcagacgcaagtaatctttcggtaataatactttgtcgatttgacggaatatctccggctcatgccgctgaacccatagcaatttaggcgcagtaaatccgggcatcatcaggttgccggtaatcacccggctttgcggaactcgcgcttccagcaaagtgcactcttgcgcacagcgcccgtcgttccacaaaatggcagggcgtaacacccgttgctgagcatccagcaaggttgctccgtgcatctggccggcaatacccaatgctttaacgtcctgcagagaatgctgatcgcccagagctttcattgcgcgatcagttgcctgccaccactgttccgggtcttgttcgctccagagtggatgcgggcggctaacggtcagcttttccgtttgcgcagcaaccacctcaccctgctcgttgagcaaaataacttttacgccgctggtgccaagatctatcccgatatacatatcgatcgttccttaaaaaaatgcccggtatcgctaccgataaccgggccaacggactgcacagttagccgttatttgtcgaacagataatggtttaccagattttccagttgttcctggcgaccactctgatgcaccggagacaaatgatgttcctgagcatatttggctaaatctgccagactcatttggcctttcaggatttgctggcccaattcgctattccagccggaataacgctgcgcgatgcgtttatccagctcgccatcttcaatcatgcgcgctgcaattttcagcgccagtgccatcgtatccatcgcgccgatatgaccgtaaaacagatcatatttatcagtactttgacgacgtactttggcatcgaagttcagaccaccggtggtgaaaccgcctgctttgagaatttcatacatcaccagcgcattctcttccacactgttcgggaactggtcggtgtcccagcccagttgcgcatcgccacggttggcgtcgacagaaccgaacaggccaagcgcaatggcggtggctatttcatgatggaaagagtgacctgccagcgtcgcgtggttagcttcaatgttcagtttaatctctttttccagaccaaactgtttcaggaagccatagaccgtcgcggcatcgtaatcatattgatgtttggtcggttcttgcggtttcggttcgataagcaacgtgccctggaaaccgattttatgtttatgctcaaccaccatctgcataaagcggcccagttgttcacgctcctgacgcaagtcggtatttaacagcgtttcgtaaccttcacgaccgccccacaggacatagttttcaccgcccaatttatgggttgcttccatcgctgtaacaacttgcgttgccgcccagctgaagacttcaggatctgggttcgtcgccgcacccgcgccgtagcgagggtttgtaaagcagttggccgttccccacagcagcttcacgccgctctcttcttgcttgcctgccaggacatcaaccatttgcgcaaaattattgatgtactcttttaagctcgcgccctcaggggaaacatccacatcgtggaagcaataaaatggcacatgtaacttgtggaaaaactcaaatgcgacatctgctttacgcttcgccaacgccagtgcctcaccaggctgctgccacggacgattaaacgcccccacaccaaacatatccgccccgttccagcagaaggtgtgccagtagcaggcggcaaaacgcaagtgctcttccatacgcttacccaacaccagttcgtcgggattgtagtgacggaatgctaacgggttactggatttactgccttcataacgaacgcgatcgagctggtcaaaataggcttgcatattgaactccataatcaggtaatgccgcgggtgatggatgatgtcgtaatattgggcactccctttcagttgctcaattatgttatttcacactgctattgagataattcacaagtgtgcgctcgctcgcaaaataaaatggaatgatgaaactgggtaattcctcgaagagaaaaatgcaataagtacaattgcgcaacaaaagtaagatctcggtcataaatcaagaaataaaccaaaaatcgtaatcgaaagataaaaatctgtaattgttttcccctgtttagttgctaaaaattggttacgtttatcgcggtgattgttacttattaaaactgtcctctaactacagaaggccctacaccatgaaaataaagaacattctactcaccctttgcaccagtctcctgcttaccaacgttgctgcacacgccaaagaagtcaaaataggtatggcgattgatgatctccgtcttgaacgctggcaaaaagatcgagatatctttgtgaaaaaggcagaatctctcggcgcgaaagtatttgtacagtctgcaaatggcaatgaagaaacacaaatgagccagattgaaaacatgataaaccggggtgtcgatgttcttgtcattattccgtataacggtcaggtattaagtaacgttgtaaaagaagccaaacaagaaggcattaaagtattagcttacgaccgtatgattaacgatgcggatatcgatttttatatttctttcgataacgaaaaagtcggtgaactgcaggcaaaagccctggtcgatattgttccgcaaggtaattacttcctgatgggcggcagcccggtagataacaacgccaagctgttccgcgccggacaaatgaaagtgttaaaaccttacgttgattccggaaaaattaaagtcgttggtgaccaatgggttgatggctggttaccggaaaacgcattgaaaattatggaaaacgcgctaaccgccaataataacaaaattgatgctgtagttgccagtaacgatgccaccgcaggtggggcaattcaggcattaagcgcgcaaggtttaagtgggaaagtagcaatctccggccaggatgcggatctcgcaggtattaaacgtattgctgccggtacgcaaactatgacggtgtataaacctattacgttgttggcaaatactgccgcagaaattgccgttgagttgggcaatggtcaggaaccaaaagcagataccacactgaataatggcctgaaagatgtcccctcccgcctcctgacaccgatcgatgtgaataaaaacaacatcaaagatacggtaattaaagacggattccacaaagagagcgagctgtaagcgttacgccccagcgcggagcgggggcgtgatttctctccatgccgcgtgaatgaattggcttaggtggagtcgttatgccttatctacttgaaatgaagaacattaccaaaaccttcggcagtgtgaaggcgattgataacgtctgcttgcggttgaatgctggcgaaatcgtcagtctttgtggggaaaatgggtctggtaaaagtacgctgatgaaagtgctgtgtggtatttatccccatggctcctacgaaggcgaaattatttttgcgggagaagagattcaggcgagtcacatccgcgataccgaacgcaaaggtatcgccatcattcatcaggaattggccctggtgaaagaattgaccgtgctggaaaatatcttcctgggtaacgaaataacccacaatggcattatggattatgacctgatgacgctacgctgtcagaagctgctcgcacaggtcagtttatccattagtcctgatacccgcgttggcgatttagggcttgggcaacaacaactggttgaaattgccaaggcacttaataaacaggtgcgcttgttaattctcgatgaaccgacagccagtttaactgagcaggaaacgagcattttactggatattattcgcgatctacaacagcacggtatcgcctgtatttatattagccacaaactcaacgaagtcaaagcgatttccgatacgatttgcgttattcgcgacggacagcacattggtacgcgtgatgctgccggaatgagtgaagacgatattatcaccatgatggtcgggcgagagttaaccgcgctttaccctaatgaaccacataccaccggagatgaaatattacgtattgaacatctgacggcatggcatccggttaatcgtcatattaaacgagttaatgatgtcagcttttccctgaaacgtggcgaaatattgggtattgccggactcgttggtgccggacgtaccgagaccattcagtgcctgtttggtgtgtggcccggacaatgggaaggaaaaatttatattgatggcaaacaggtagatattcgtaactgtcagcaagccatcgcccaggggattgcgatggtccccgaagacagaaagcgcgacggcatcgttccggtaatggcggttggtaaaaatattaccctcgccgcactcaataaatttaccggtggcattagccagcttgatgacgcggcagagcaaaaatgtattctggaaagtatccagcaactcaaagttaaaacgagctcccccgaccttgctattggacgtttgagcggcggcaatcagcaaaaagcgatcctcgctcgctgtctgttacttaacccgcgcattctcattcttgatgaacccaccaggggtatcgatattggcgcgaaatacgagatctacaaattaattaaccaactcgtccagcagggtattgccgttattgtcatctcttccgaattacctgaagtgctcggccttagcgatcgtgtactggtgatgcatgaagggaaactaaaagccaacctgataaatcataacctgactcaggagcaggtgatggaagccgcattgaggagcgaacatcatgtcgaaaagcaatccgtctgaataacgcattgaggagcgaacatcatgagcaaaagcaatccgtctgaagtgaaattggccgtaccgacatccggtggcttctccgggctgaaaagtctgaatttgcaggtcttcgtgatgattgcagctatcatcgcaatcatgctgttctttacctggaccaccgatggtgcctacttaagcgcccgtaacgtctccaacctgttacgccagaccgcgattaccggcatcctcgcggtaggaatggtgttcgtcataatttctgctgaaatcgacctttccgtcggcagtatgatggggctgttaggtggcgtcgcggcgatttgtgacgtctggttaggctggcctttgccacttaccatcattgtgacgctggttctgggactgcttctcggtgcctggaacggatggtgggtcgcgtaccgtaaagtccctagttttattgtcaccctcgcgggcatgttggcatttcgcggcatactcattggcatcaccaacggcacgactgtatcccccaccagcgccgcgatgagtcaaattgggcaaagctatctccccgccagtaccggcttcatcattggcgcgcttggcttaatggcttttgttggttggcaatggcgcggaagaatgcgccgtcaggctttgggtttacagtctccggcctctaccgcagtagtcggtcgccaggctttaaccgctatcatcgtattaggcgcaatctggctgttgaatgattaccgtggcgttcccactcctgttctgctgctgacgttgctgttactcggcggaatgtttatggcaacgcggacggcatttggacgacgcatttatgccatcggcggcaatctggaagcagcacgtctctccgggattaacgttgaacgcaccaaacttgccgtgttcgcgattaacggattaatggtagccatcgccggattaatccttagttctcgacttggcgctggtagtccttctgcgggaaatatcgccgaactggacgcaattgcagcatgcgtgattggcggcaccagcctggctggcggtgtgggaagcgttgccggagcagtaatgggggcatttatcatggctagtctggataacggcatgagtatgatggatgtaccgaccttctggcagtatatcgttaaaggtgcgattctgttgctggcagtatggatggactccgcaaccaaacgccgttcttgattttgataaaaattttctcaaagccggttacgtattaccggttttgagtttttgcatgattcagcaggaaaagaaccatgtttactaaacgtcaccgcatcacattactgttcaatgccaataaagcctatgaccggcaggtagtagaaggcgtaggggaatatttacaggcgagtcaaagcgaatgggatattttcattgaagaagatttccgcgcccgcattgataaaatcaaggactggttaggagatggcgtcattgccgacttcgacgacaaacagatcgagcaagcgctggctgatgtcgacgtccccattgttggggttggcggcagctatcaccttgcagaaagttacccacccgttcattacattgccaccgataactatgcgctggttgaaagcgcatttttgcatttaaaagagaaaggcgttaaccgctttgctttttatggtcttccggaaagtagcggcaaacgttgggccactgagcgcgaatatgcatttcgtcagcttgtcgccgaagaaaagtatcgcggagtggtttatcaggggttagaaaccgcgccagagaactggcaacacgcgcaaaatcggctggcagactggctacaaacgctaccaccgcaaaccgggattattgccgttactgacgcccgagcgcggcatattctgcaagtatgtgaacatctacatattcccgtaccggaaaaattatgcgtgattggcatcgataacgaagaactgacccgctatctgagccgtgtcgccctttctagcgtcgctcagggcgcgcggcaaatgggctatcaggcggcaaaactgttgcatcgattattagataaagaagaaatgccgctacagcgaattttggtcccaccagttcgcgtcattgaacggcgcagtacagattatcgcagcctgaccgatcccgccgttattcaggccatgcattacattcgtaatcacgcctgtaaagggattaaagtggatcaggtactggatgcggtcgggatcagccgctccaatcttgagaagcgttttaaagaagaggtgggtgaaaccatccatgccatgattcatgccgagaagctggagaaagcgcgcagtctgctgattagtaccaccttgagcatcaatgagataagccaaatgtgcggttatccaagcctgcaatatttctactctgtttttaaaaaagcatatgacacgacgccaaaagagtatcgcgatgtaaatagcgaggtcatgttgtaacgatgatgagaattgtcggcgtcacatcaggtaacgctgcgtggttgtcggatgcggcgtgaacgccttatccgacctacccgccaggcatgataaaacgcaccaacaacgcttcaggctcgtagctcaactgcctgagacaaagtaaaaagccttatccgactgacaagtcggataaggctcaaggaaatgcaattacatatgcgccgcgattaaccgttggttatcctggtacattgcgaacaggtagttgttataactcttccctttggtgctgtagcccttcagcttgtgaatcatcgctgtggcagtcacttcctgatccgctttacgcagctgcgcacggcttttacggaagctagagtaagccgggtgcgtattcaggttagtgacataggcgctcacgctttctttgacagaactaaactgactgtaccctttcactttacctggcgcattggtacaacgtcctttcatgcatttcatgccgaacaggttgttgttgttgcgcgccagcttgctcgttccccaaccgctttctgctgcagccatcgtcgccaccatactggtggggataatgtctacgcgttcaagcaaggtattccacgggatttttcgcgtattaccggaccacttcaccttgtagcgtttggcgatgtctttcagacgcgcacgctcagcaggactccattggccctgatactgtttactaatgagccagttacgttccgcagtaatggccgcattttggctggtaatgtaaggcattacggtccggagaaacgcctttttccttggtgttccggaagggtattttcgcaaatcaggaagactactactctttgcactattgcgagaatactcttgtttactgcttacctgtttattactagctttagttaagtgggacttttgactcgctgttgttgtgtgcgtcttcgctaacacctcactgctaaacaccagagtgagtaacataagaatcatcgccccatatcgtcgtatgggagtcaaaatcatcaggtctcctggtcggatttaatcattccaacaccttatatttttcacaaatttgagagttgaatctcaaatcatatcaaaaatagctgtcaagagcaccccaaggaatagtccaaatctgaaactatgtcacgtgttaacgattcagattggcgctaaatcgcagaaaatgtgggggttatcgcaaaattcagccgttttttgcgcgagatcgctcacccttgcttctcatcctgtggacttaccgctcagggatgagttttgtttggcttatcgctggcaaactgtctgaaatcgcagcaataaggactcatccgccatgaaactcgccgcctgttttctgacactccttcctggcttcgccgttgccgccagctggacttctccggggtttcccgcctttagcgaacaggggacaggaacatttgtcagccacgcgcagttgcccaaaggtacgcgtccactaacgctaaattttgaccaacagtgctggcagcctgcggatgcgataaaactcaatcagatgctttccctgcaaccttgtagcaacacgccgcctcaatggcgattgttcagggacggcgaatatacgctgcaaatagacacccgctccggtacgccaacattgatgatttccatccagaacgccgccgaaccggtagcaagcctggtccgtgaatgcccgaaatgggatggattaccgctcacagtggatgtcagcgccactttcccggaaggagccgccgtacgggattattacagccagcaaattgcgatagtgaagaacggtcaaataatgttacaacccgctgccaccagcaacggtttactcctgctggaacgggcagaaactgacacatccgcccctttcgactggcataacgccacggtttactttgtgctgacagatcgtttcgaaaacggcgatcccagtaatgaccagagttacggacgtcataaagacggtatggcggaaattggcacttttcacggcggcgatttacgcggcctgaccaacaaactggattacctccagcagttgggcgttaatgctttatggataagcgccccatttgagcaaattcacggctgggtcggcggcggtacaaaaggcgatttcccgcattatgcctaccacggttattacacacaggactggacgaatcttgatgccaatatgggcaacgaagccgatctacggacgctggttgatagcgcacatcagcgcggtattcgtattctctttgatgtcgtgatgaaccacaccggctatgccacgctggcggatatgcaggagtatcagtttggcgcgttatatctttctggtgacgaagtgaaaaaaagcctgggtgaacgctggagcgactggaaacctgccgccgggcaaacctggcatagctttaacgattacattaatttcagcgacaaaacaggctgggataaatggtggggaaaaaactggatcagaacggatatcggcgattacgacaatcctggattcgacgatctcactatgagcctagcctttttgccggatatcaaaaccgaaagtactaccgcttctggtctgccggtgttctataaaaacaaaatggatacccacgccaaagccattgacggctatacgccgcgcgattacttaacccactggttaagtcagtgggtccgcgactatgggattgatggttttcgggtcgataccgccaaacatgttgagttgcccgcctggcagcaactgaaaaccgaagccagcgccgcgcttcgcgaatggaaaaaagctaaccccgacaaagcattagatgacaaacctttctggatgaccggtgaagcctggggccacggcgtgatgcaaagtgactactatcgccacggcttcgatgcgatgatcaatttcgattatcaggagcaggcggcgaaagcagtcgactgtctggcgcagatggatacgacctggcagcaaatggcggagaaattgcagggtttcaacgtgttgagctacctcagcagccatgatacccgcctgttccgtgaagggggcgacaaagcagcagagttattactattagcgccaggcgcggtacaaatcttttatggtgatgaatccagccgtccgttcggtcctacaggttctgatccgctgcaaggtacacgtagcgatatgaactggcaggatgttagcggtaaatctgccgccagcgtcgcgcactggcagaaaatcagccagttccgcgcccgccatcccgcaattggcgcgggcaaacaaacgacacttttgctgaagcagggctacggctttgttcgtgagcatggcgacgataaagtgctggtcgtctgggcagggcaacagtaacttttccggcttcccgttcgtcagtacctcgggaagccgccaaccaggataaaatgtcagccctaatcagcgttgcaggataaagcaccgctcactcttcaacagaccgatttgcaccccagcaaatgtagcgttattgttaccttccttgctacagagttcgacagatatcccgctatgacattctccctttttggtgacaaatttacccgccactccggcattacgctgttgatggaagatctgaacgacggtttacgcacgcctggcgcgattatgctcggcggcggtaatccggcgcagatcccggaaatgcaggactacttccagacgctactgaccgacatgctggaaagtggcaaagcgactgatgcactgtgtaactacgacggtccacaggggaaaacggagctactcacactgcttgccggaatgctgcgcgagaagttgggttgggatatcgaaccacagaatattgcactaacaaacggcagccagagcgcgtttttctacttatttaacctgtttgccggacgccgtgccgatggtcgggtcaaaaaagtgctgttcccgcttgcaccggaatacattggctatgctgacgccggactggaagaagatctgtttgtctctgcgcgtccgaatattgaactgctgccggaaggccagtttaaataccacgtcgattttgagcatctgcatattggcgaagaaaccgggatgatttgcgtctcccggccgacgaatccaacaggcaatgtgattactgacgaagagttgctgaagcttgacgcgctggcgaatcaacacggcattccgctggtgattgataacgcttatggcgtcccgttcccgggtatcatcttcagtgaagcgcgcccgctatggaatccgaatatcgtgctgtgcatgagtctttccaagctgggtctacctggctcccgctgcggcattatcatcgccaatgaaaaaatcatcaccgccatcaccaatatgaacggcattatcagcctggcacctggcggtattggtccggcgatgatgtgtgaaatgattaagcgtaacgatctgctgcgcctgtctgaaacagtcatcaaaccgttttactaccagcgtgttcaggaaactatcgccatcattcgccgctatttaccggaaaatcgctgcctgattcataaaccggaaggagccattttcctctggctatggtttaaggatttgcccattacgaccaagcagctctatcagcgcctgaaagcacgcggcgtgctgatggtgccggggcacaacttcttcccagggctggataaaccgtggccgcatacgcatcaatgtatgcgcatgaactacgtaccagagccggagaaaattgaggcgggggtgaagattctggcggaagagatagaaagagcctgggctgaaagtcactaaaaattgcctgatgcgctacgcttatcaggcctacatgatttctgcaatatattgaatttggaagaatttgtaggccggataaggcgtttacgccgcatctggcataaacaaagcgcactgttccggcgttgagaaacgccggaaaacgtttcaaacaggctgctgccgtagccgatgccgctgcactttctcgacatccatgcactgcaacgcctttgtcgggcaggcttcaacacaggccggtcccgtctcccgatgccagcacagatcgcacttaatcgccctcgcctttttgcggctagaaacgacctccatcgcaccaaacgggcaagccagcatacagcttttacagccaatgcaacgtgtttgttcaacgaaaatatgcccatgttcgcggcttatcgcgtcaacagggcagacattcgcgcacggtgcatcttcacactgatgacaggctactgccgtggtccagcagtggtctttaatgacacgaatacgggaaataaactcgtctggactcaacgcagcgcaatcctgattctcatgatggctcactgcgcaagccacttcacaggtacggcaaccgatacatttcgtcgcatccgcaataataaaccggttcatgatcactcctttgcactaaaacagcagagtgccagagagcgcgtccctactgctttgatccaacgaaggaaatgttaaagttttggcacttgtccaaagcgttatgtgatcgcgcccaggtcatccctgacagtaaatcccagttcattagaaatagcctgcgcggtttcacgcagtggtttcaggagatttttctctcccacctgtttcagacgacttgtgctaaggctaatgctcacggcgtacggcacccgcccatgaatatcaaacaccggaacagcaatacaggagacgccgagttcgttttcttctctgtccatcgccgctccgctttcacgaatgtgcgccagttcgtcgaacatcgcgggcagctcggtaatggtattgcgggttaacggctggatctcatgctgatggctttcccagtaactcttcacgtagtccgggtgaccaaacgccatgtagatcttgcccattgcggaacagtagagcggcatatgctggccaatataggcacgggttcgcagcatcccggttgtgggttccagcttataaatcaaaatagcgtgatcgtcttcgcggctggagaagttaatggtttcaccagtggcgatgttcagtgcctcaagatgcggagcggcgatatgaatgatattcaggctagacagcgccttctgcccgacggcaataaatttggtggtcaggcgataactccctgcggcaggcgcggtggtcacatagccgcaggactgtaatccctgcaataagcgatggacggtactcttatttaaaccagccagctcgctaagatgcgccaacggacaaccgtttggatagttgctcaaaatctcaatcagcatcaacccgcgaaacagactctggcttccggctggacgctctttttcctgcgccatctcgttctctttttttcccatcacttctttccccattttgtcgcgtcctgatggtagcgcaaagtgtgccgtagttcacgatctcgacagataatttataaccaattgatttttatgtcttttgaaattcatcaatcagattgccttgttaaaaagtgatcgatatatttgaaatcaagtttcgcatattgaaattttaagccaaaaaagcgatcaaaaaaacaaggaagcctgggatgaaagtgacatttgagcagttaaaagcagcctttaatcgggtcttaattagtcgcggcgttgacagcgaaacggctgacgcctgtgcagagatgttcgcccgcaccaccgaatccggcgtttattctcacggcgttaatcgtttccctcgtttcattcaacaactggaaaacggcgatatcattcctgatgcccaacccaaacgtataaccagcctcggcgcaattgaacagtgggacgcccagcgtagcatcggtaacctgacagcgaaaaagatgatggatcgcgccattgaactggctgccgatcacggtattggtctggtggcactacgtaatgccaaccactggatgcgcggcggcagctacggctggcaggcggcggaaaaaggctatattggcatttgctggaccaactccatcgccgtaatgccgccgtggggcgcaaaagagtgtcgcataggcactaacccgctgatcgtcgccattccttccacgccgatcaccatggtcgatatgagcatgagcatgttctcttacggcatgttagaagttaaccgtctggcaggtcgtcagctcccggtcgatggtggctttgatgatgagggcaatttgaccaaagaacctggcgttatcgagaagaatcgccgcattttgccgatgggctactggaaaggttctggcatgagcattgtgctggatatgatcgctactctcctttccgacggcgcatccgttgccgaagtcacccaggacaacagcgacgaatacggcattagtcaaatttttattgccattgaagtggacaagcttatcgacggtcccacccgcgatgccaagctgcaacgcatcatggattacgttactagtgccgagcgtgctgacgaaaatcaggccattcgcttacccggccatgaatttactaccctgctggccgaaaaccgccgtaacggcatcactgttgatgacagcgtgtgggccaaaatccaggcgttatgaggagataagtcatgatttttggacatatcgcgcagcccaatccgtgccgtttgcccgccgccattgaaaaggcgctcgattttctgcgcgctaccgatttcaacgccctggagccgggcgttgtcgaaatcgacggcaaaaatatttatacgcaaattatcgatttaaccacacgcgaagcggtggtaaaccgtccggaagtgcatcgtcggtatatcgatattcagtttctggcgtggggcgaagagaaaatcggcattgctattgatacgggaaataataaagtcagcgaaagtctattagagcagcgcaatattattttttatcacgacagtgaacatgaaagttttatagaaatgataccgggcagctacgcaattttctttccgcaggatgttcaccgaccaggttgtattatgcaaacagcctctgagatacgaaaaattgtggttaaagtcgcattaacggcgctgaattaatcgaataatcgtctacgccagaacgcctgggtaatgttattgctctaactatattaataattcaggttgctgcacatgcgacttgaattatgacagacatagcctcaaggaatagctatgaaaaaaatactcgaagcaatactggcgattaatctcgccgtactttcctgtattgtatttataaacattattttaagatatggttttcagacaagcattttatctgttgatgaattgagtcgttatttatttgtctggttaacgtttattggcgcgattgtagcttttatggataacgcccacgttcaggtcacctttctggtggagaaactctcccccgcatggcagcgacgagtcgctctggttacccattccttaatcttatttatttgtggcgcactggcctggggcgcaacgctaaaaacaattcaggactggagcgattatagtccgatcctcggtttacccatcggcctgatgtatgccgcttgtctgcccaccagcctcgttatcgcattctttgaactgcgtcatttatatcaactcatcacgcgtagcaattctctaacgagcccaccgcaaggagcttaatcatggctgtgctgatttttctgggctgtctgttgggtggtattgctatcggtttgcctattgcctgggcactgttgttgtgcggggcggcgttaatgttctggctggacatgtttgatgtccagatcatggcacaaacgctggtgaacggagccgatagcttctccctgctggcgattccgttctttgtgctggcgggtgaaatcatgaatgcgggcggcttgagtaaacgcattgttgacctgccgatgaaactggtggggcataaaccaggcgggctgggctacgtcggcgtgctggcagctatgattatggcgagcctttctggttctgccgttgcggataccgccgccgttgccgctctactggtgccgatgatgcgcagcgccaactatccggtcaaccgggcggcggggctgattgcctctggcggcattatcgcgccaattattcccccttccattccgtttattatcttcggcgtttccagcggattatccatcagtaagctgtttatggcgggcattgcccctggcatgatgatgggcgcaacgctgatgcttacctggtggtggcaggccagtcgccttaatttaccccgccagcaaaaagcaacgatgcaggaaatctggcactcttttgtctccggtatctgggcgctgtttcttccagtcatcattattggcgggtttcgctccggcctgtttacccctaccgaagccggggccgttgctgctttctatgcgctgtttgtcgccacagttatttaccgtgaaatgaccttcgccacactttggcatgtactcattggcgcggcgaaaaccaccagtgtggttatgtttctggtggccagcgcacaagtttccgcctggctgattaccattgctgaactgccgatgatggtttctgatttactgcaaccgttggtcgatagtccgcgtctgctgtttatcgtcattatggtggctatcctgattgtcggcatggtcatggatttaacgccgacggtattaattcttaccccggtattaatgcctttagttaaagaggcaggaatcgatccgatttatttcggtgtcatgtttatcattaactgcagtatcggcttaattacaccgcctatcggtaatgtacttaacgttattagtggggtggcaaaactcaaattcgatgatgcagtcagaggcgttttcccttacgtcctggttttatatagtttattagtcgtatttgtttttattcccgatctcatcatcctccctttgaaatggattaattaaaaggaaaatattatgaaattacgctctgtaacctacgcattattcattgctggcctggctgcattcagcacatcttctctggcggcacaatctttacgtttcggttatgaaacaagtcaaaccgacagccaacatattgcggcgaaaaaattcaatgatttattgcaggagagaaccaaaggcgagctgaaattaaaactgttcccggacagcactctcggtaacgcgcaggcgatgatcagcggcgtacgtggcggcaccatcgatatggaaatgtccggcagcaataactttgccgggttaagtccagtgatgaacttgcttgatgtccctttcctgttccgcgataccgctcacgcgcataaaacgctcgacggcaaagtcggtgatgatctgaaagccagtcttgaaggtaaaggactgaaagtactggcctactgggaaaacggctggcgcgatgtcaccaacagccgcgcaccggttaaaacccccgccgacctgaaagggctgaaaatccgcaccaacaatagcccgatgaatatcgccgcattcaaagtctttggcgctaacccgatcccgatgccgtttgccgaagtctataccgggctggaaacccgcactatcgacgctcaggaacacccgatcaacgtcgtctggagtgcaaaatttttcgaagtgcagaagttcctttctctgacgcaccacgcctattccccgcttctggtggtgatcaacaaagcgaagtttgatggcttaagtccggagttccagcaggcgctagttagttctgcacaagaagcgggtaactatcagcgcaaactggttgctgaagatcagcaaaaaatcatcgacggcatgaaagaagcgggcgtggaagtcatcaccgatctcgaccgcaaagcctttagcgacgcactggggaatcaggttcgcgacatgtttgttaaagatgtgccgcagggagctgatctgctgaaagccgtggatgaggtgcaataaaccatgacgcaatactggctggggttagattgtggcggtagctggctgaaagccgggctgtatgaccgcgaaggccgggaggcaggcgtgcagcgcctgccgctgtgcgcattaagcccgcagccaggctgggcagagcgcgatatggcagaactgtggcaatgctgcatggctgtcattcgcgccctgcttactcattctggtgttagcggggaacaaattgtcggtatcggcatctccgcacagggaaagggcttgtttttgctggataaaaacgacaaaccgctcgggaatgctattttgtccagcgaccgccgggcgatggaaatcgttcgtcgctggcaggaagatggcatcccggaaaaactctacccgctgacccgacaaaccttgtggaccgggcatccggtgagcctgttacgctggctgaaagagcacgaaccagaacgctacgcgcaaattggctgcgtgatgatgacgcacgactacctgcgctggtgtttaactggcgtcaaaggctgtgaagagagcaatatttccgagtccaacctctacaacatgagtcttggggaatatgacccgtgcctcaccgactggctggggatcgctgaaatcaatcacgccctgccgcctgttgtcggatctgccgaaatctgcggggagatcaccgctcagacagccgccctgaccggtctgaaagcgggtacgcccgttgttggcggcctgtttgatgtggtttccaccgcactctgcgccgggatcgaagacgaatttaccctcaatgcggtgatggggacctgggcggtgaccagcggcataacccgcggtttacgtgacggtgaagcgcatccgtatgtctatggtcgctacgttaacgatggtgaatttatcgttcacgaagccagccctacctcttccggcaacctcgaatggtttaccgcacagtggggagaaatcagctttgatgagatcaatcaggccgttgccagcttgccgaaggctgggggcgatctctttttcctgccgttcctgtacggcagcaacgccggactcgagatgaccagtggtttctacgggatgcaggccattcacacccgcgcgcacctgttgcaggccatctatgaaggggtggtgttcagccatatgacccacctcaaccgaatgcgcgaacgttttactgatgttcacaccctacgcgtcactggcggcccggcgcactccgatgtctggatgcaaatgctggcggacgtcagcggtctgcgtatcgagctgccgcaggtggaagaaaccggctgctttggtgcggcccttgccgcccgcgtcggcaccggggtttatcacaacttcagcgaagcccaacgtgacttgcgacacccggtgcgcaccctgctgccagatatgaccgcccatcagctttaccaaaaaaaatatcaacgttatcagcatctcattgccgcacttcagggctttcacgcccgcattaaggagcacacattatgagccgaccacttctgcaactggccctcgaccacagtagtcttgaagccgcgcagcgcgacgtgacgctgttaaaagacagcgtcgatatcgtcgaagcgggcaccattctctgtttaaacgaagggcttggcgcggtgaaagccttgcgcgaacagtgcccggacaaaatcatcgttgctgactggaaggtcgccgacgctggtgaaacgctcgcgcaacaggcgtttggcgcaggcgctaactggatgaccatcatctgcgccgcgccgctcgcgacggtagaaaaaggccacgcaatggcacaacgctgcgggggtgaaattcagatagagctgttcggtaactggacgctggacgacgcccgcgactggcatcgtattggcgtgcggcaggccatttatcatcgcggtcgtgatgcacaggccagcgggcaacagtggggcgaagccgatctggcacgcatgaaggcgcttagtgatatcggccttgagctttccattactggcgggattacccctgctgacctgccgctgtttaaagatatccgcgtgaaagcgtttattgccgggcgggcactggcaggcgcggcaaatccggcgcaagtggctggcgatttccatgcgcaaatcgacgctatctggggaggtgcgcgtgcgtaatcatcagttagggatttatgaaaaagcgctggcgaaagatctctcctggccggagcggctggtgctggcaaaaagctgcggttttgattttgtcgaaatgagcgtggatgaaaccgacgaacggctcagtcgtcttgactggagcgccgcacaaaggactagcctggttgccgcgatgatcgaaacaggtgttgggatcccgagcatgtgcctgtccgcacatcgtcgctttccctttggtagccgtgacgaggcagtgcgcgaacgggcgcgggaaatcatgagtaaagcgattcgcctggcgcgcgatctcggcattcgcaccatccagctggcaggttatgacgtctattacgaagaccacgacgaaggcacccggcaacgttttgctgaagggctggcgtgggcagtcgaacaggcggcggcaagtcaagtaatgctggcggtggagattatggataccgcgtttatgaactccatcagcaaatggaaaaaatgggacgagatgctcgccagtccgtggttcaccgtctacccggacgtcggcaacctcagcgcctggggcaatgatgttcccgccgaactgaaactgggcattgaccgtatcgccgcgatccacctgaaagacacccagccagtcaccgggcaaagtcccggacagttccgcgacgtgccgtttggcgaaggctgcgtcgatttcgttggcatcttcaaaacgctgcataaactgaactatcgcggttctttcctgattgagatgtggaccgaaaaagccaaagagccggtgctggagattattcaggcgcggcgttggattgaagcgcgtatgcaggaggctggatttatatgttaacgtaaatgcaggaggctggatttatatgttagagcaactgaaagccgacgtgctggcggcgaatctggcgcttcccgctcaccatctggtgacgttcacctggggcaatgtcagcgcggtagacgaaacgcggcaatggatggtaatcaaaccttccggcgtcgagtacgacgtgatgaccgccgacgatatggtggtggttgagatagccagcggtaaggtggtggaaggcagcaaaaaaccctcttccgatacaccaacgcatctggcgctctaccgtcgctatgccgaaattggcggtattgtgcatacccacagccgccacgccaccatctggagtcaggccgggctggatctccccgcctggggcaccacccacgccgattatttttacggtgccatcccctgcacgcgacagatgaccgcagaggagattaacggcgaatatgaatatcagaccggcgaagtgatcattgaaaccttcgaagaacgtggcaggagtccggcacaaatcccggcggtgctggtgcattctcacggcccgttcgcatggggtaaaaacgccgccgatgccgtgcataacgccgtagtactcgaagaatgcgcctatatgggtctattcagccgccagcttgcgccgcagctccctgcgatgcaaaacgaactgctggataagcactacctgcgtaagcatggggccaatgcctattacgggcagtaatccctcacgccggggcttcatcgccccggcactacgaattgatatgttccttgctgtaacgccgcttccacgctgctggcgttaaaccagtatgtttctgaaaaatctgccggaaatagccaacgtcattaaaccgtattgcatggagcaggccgacaacgtcgagtcactgcataacctgttgctgcccgccgatgcgccatttacgacatttgaaggcaagggattgttcagccataagatcctgattcagacgccaggttcccggtatgaacagagcaatccagagcaacaacctttgtggcattacgacggagcaccagccgcaccgacatccaccggtgaattaaaaacgccagctcaccccggtgacaaaggtaaaactctcattacgatcaatcatcgggctgtcggtaatctcttccggcagctcgctgtatcctgcgctcgccatcaatacgacgtgctctcctatcgggtattttgccgtcaggctgacatagggcacccaggcatcctgcgcggaataacttgccagaccgctacgacgggactcactctcactaatgccatagtaatagtcactgaaattctcgtcataatagagaacgcccagcgcaggtgtcaggctcagacgacctatctgcattttgtggaatacgcttagctcccccacccagccgttgctgttatccagaacgtccgcagctgcagaggctttcacggttccccaacgctcgtggtgataccaggcaacccccgccatagccgtactatcacgcttatcaagctgttgcatggcataatcgtcattatcggtagggtcaaattccagcggcatccaggatgcggtcaggctaagttcatttttttcactttggctcagaataaaacctaacgtggtctgacgaacataaaaagtatcaccttcataactaatcagcggaattgccttcgtattttcattataaccgcgataagggctttcattataagccgcaccagcaccaatggataattcagaagcagttgcgcttgccataaaaggcaacgcaaataacgccacaatattgcgattaattaacatgtccggtattccattttaaaataagataaaaaagagtcggcataataatgcttacaatttctccggtgcaagattcatatttatatagtaatatataaaattatatataattgggctgttgcgatgacaaaattacaacttaagtaccgggagttaaaaattatcagcgtaatcgctgccagtgaaaatatcagccatgccgcgactgtacttggcatcgcacaggccaacgtcagcaaatatcttgctgattttgaaagtaaagtgggtttaaaagtctttgaccgaaccacccggcagctgatgctcacaccttttggcaccgcgctgttaccgtacatcaacgacatgctggacagaaacgagcaacttaataattttattgcagattataagcatgagaaacgtggtcgggtcaccatctacgccccaaccggcataattacctatttatccaaacatgtaatcgataaaattaaagatatcggtgatatcaccttaagcctaaaaacctgcaatcttgagcgtaatgccttttatgaaggcgtcgaatttcctgatgattgtgatgttttaatcagctacgctccaccaaaagatgaaagcctggttgccagttttattacccaatatgccgtaaccgcttatgccagccagcgctatcttgagaaacatcccattagccgtcctgacgaactcgaacatcactcctgtattttgatcgacagcatgatgatcgacgacgcgaatatctggcgcttcaacgtcgccgggagtaaagaggtgcgggattatcgcgtgaagggaaattacgtttgcgacaacacgcaatctgcgctggagctggcacgaaatcacctggggattgtgtttgcgccagacaaaagtgtgcagagcgacctgcaagacggcacgctggtgccctgctttcagcaaccctatgaatggtggctggatctggtggctatcttccgtaaacgggaataccagccctggcgggtccagtatgtgctggatgaaatgctgcgtgaaattcgccaccagcttgctcagagccagcaactgcggcctgaacaagcggcggaaagcgaagattaatgatcgagataaaggtaatgcacccagctggtcatgcgtaatagcactttgcgcatcacgctgacatggctgaaatgatcagagtaaaccgccacctgggcgtaaataccgtctggtaaagcgctcaaatcagtgtgctcatccagttcaatggtcgcgataacgccatcactacccggcgctgtgtttaacgtctgtaaggtgccggtgctctgataagctccgccgggaacggctggactaatggctgccagcttaccgctgaataccttacctggcagagcattaaacaccacttccgcatcgtcgccaggagccagtcgcagcaaggagttctgacggaactgcgccacgatttgtcgtttctgatcgggtataaacaccatcaccggacgtagcggcaggctcgcggcataggtacccggacgaatcagtacctgggtcacataaccatcgctcggcgcacgcactatcgtctgctcaaggttatattttgcttccgcgagctgtgctttcaggctggcgatttgagaatgttcacccaacaccaggctatccagctggctctggatctgtttttgttccgccgcgctactcttcacggaggcttcctgcgccagataattttgccgcgccacatcgatatcgcgttcactaaacgggtttactttcgcctggctgccacgtgcgtaacgctgatactctttagcgaatttatcccgcgtggcctttgcctgctgagtattcgccgccatctcatctaactctgcgcccaacgcccgctgtttatgttctgcggtaacgatatccgccatcagccgatccacccgcgcctgataacgcgtcgggtccagtcgaaatagcacctcaccttttttaatcagcgtatttttcttatccgtcacttcaatcaccacaccagtcacctgtgggacaacaggaatagaaataaccgctttttgcgctttaaaggtatacggatggttatagttcattaacagaattagaccgctgacaataaatattccacccagggccgctgtgggaatggtccatttatttacgggaattttgaagatcttaaacattgcccatgcaaaagccacataggtcaaaataatcagtaaatccataagtattactcggcagaagaggatttgatgtcggcgagctgtttctccagcccggcaatgcgctgttgcagttgcataacggaactatcatggctttgcattccccatccccgctccgggcggtaaagcgtggcccaaatccacaaaaacggccagataacatgtaacgtaaaaagactcacccaaccagcaacatgaatggcgtcggcatgaggatgattacgttttttggcaatcaggtagggaatatcatgtaaaataatgatcccatagaagatcaccagaaatacaaaaataagcactcccagtgcaaaatagtccaggaacatatttccctcaaagaatataaaaaagaacaattaacgcatattatgaaatgccatgatgcagtgcaatttccttatttatataacgacatattgttttttatatactttcttaaatgtgctgtctggtttttcaacaggacgaggtttatcatattgaaatagtggaactattggccaaactaatgaataactccagtaaaacatccacagtacagattaagcgtattaaaccttcaattatctaccgtttattgctgattggcctcggatcaccaatggtgatttacggcctggttcgcccgctcaccatcgaaacgcgagattaaactcctgacaaaacacgccccagaaacgtacttctgttggcgtagtctgggttattgcgcacgtaggtttaaaacgtaaattgtaacaacgtgcgctttgtttatgccggatgcggcgtgtacgccttatccggcctacggtcaggttcccgtaggcatgataagacgcgtaagcgtcgcatcaggcaatgaatacccaatgcgaccagcttcttatatcagaacagccccaacggtttatcgctgtagctcaccagcaggcacttggtttgctggtaatgctccagcatcatcttgtgggtttcgcgaccgataccactttgtttgtagccaccaaacgccgcatgtgccgggtaagcgtgataacagttggtccacacgcgcccagcctgtatgccgcgccccatcttataggccagattaccgttgcggctccagacgcccgcgcccaggccatattgcgtatcgttcgccagctccagcgcttcttccatcgttttgaaggtggtcaccgccagcaccgggccaaaaatctcctcctggaacacccgcatattgttctgaccaaacagaatcgtcggttcgaggtagtagccgtctttcagttcaccttccagcagcttgcgccgcccgcctgtgagcacgtcagcgccctcttttttaccgatatcaatgtagttgaggatggtttccagttgcccgtgagaaacctgcgcgcccatttgcgtcacgctgtcgagcgggttaccgctacgaatgctttcgacacggcggatggcgcgttccataaagcgttcgtagatagattcctgcactaaagcacgactcggacaggtgcaaacttcgccctggttaaaggcaaacagtgcaaagccttccagcgctttatcgaaaaaggcatcttcttcatccatcacatcagcaaagaagatatttgggctcttaccgcccaactccagcgtcaccggaataatgttttgcgttgcgtattgcataatttgttggcccacttccgtactgccggtaaacgccactttggcgatgcgtttgctggtcgccagatattcgccaattaccccacctgcgccattgaccacgttcaccacgcccggcggcagtaaatcaccgacaatttccattagcagcagtacagaaagcggggtaagacgtgcgggtttcagcaccacacagttgcccgccgccagcgcgggagccattttccagctcgccatcagcagcgggaagttccacgggataatctgccccaccacgcctaacggttcatggaaatgataggccacggtttcgctatcaacttcactgatcccaccttcctgcgcccgaatacagctggcgaaatagcggaaatggtcaatcgccagcggtacatccgcagcactggtttcgcgaatgggtttgccgttatcccaggtttcagctgtcgctaacagctcgaggttttgttccattcgatcggcaatcttaaacagaatcgccgcacgatcctgcacgctggtgtgcgcccatttatctttcactttgtgcgcagcatccagcgccagatcgatgtctcgtttgccgctagacgccacttcgcacagcagctgcccggtcaccggcgtcagattctggtaatactcgccgtcggcaggggctacccattcgccgccaataaagttgtcatagcgggcttttaacttgagggggaaaccatactcgccgggcttaatctgtgcactagggggattattggtcatgatcgtctccttgcggtgtgaggtataacaagggtagacgtgactggcgaaatcttcgccagtcggtaacagctttacgacagctatcacgaatttacgggcaagggttacagagatagttgaaaaagcggctaacaatttgccagccgttgtggaaatgatgattacatcgctgcgcgataaatcgccacaatttcttcgtgagttgcctggatcgggttagtaaagccacaggcatctttcagggcattagtcgccaataccgcgaaatcttcttctttcacgttcaggtcgcgtaggcctgccgggatatccactttcttcgccagttcacggatggcgttaatgcaggcttcagcaccttccgcgtcgtttttacctgtcacgttcacgcccattgcagcggcacagtcacgcagacgtgcagcggcgactttgctgttgaatacctgaacgtgcggcagcaaaacggcgttacatacaccgtgtggcaggttgtagaaaccgcccagctggtgcgccatcgcatgaacataacccagagaagcattattgaacgccataccggcgaggaactgggcataagccattgcttcacgcgctttcgcattactgccatcttcaacggctaacggcaggttttcggcaatcatggtcacggctttcagtgcacaagcgtcagtgatcggcgtggcggcaatagaaacatatgcttcgatagcgtgcgttaaggcatccatacccgttgcggcggtcagactcttcggcataccaatcatcagagaggagtcattgacagaaagcagcggagtgacatgtttatcaacaatcgccattttgatatgacgcgcttcgtcagtgatgatgcagaaacgggtcatttcagaggccgtacccgccgtggtattgatggcgatcatcggcagctgcggttttgcagagcggtcaacgccttcgtaatcgcgaatatcgccgccattggctgccaccagcgcaataccttttgcgcagtcgtgtggagaaccaccgcctaaggagatcacgctatcgcaattattctctttaagtaatttcaaacctgcggcgacgttttccgtggtggggttaggttgggtgccatcataaataacgctaaaaatattgcgttcttccagtgctttttgcacatcgcccgccatacctaatttcgttaacatattgtcagtgacaattaaggtacgggtaaatccataatctgccatcatattcattgcatcagtcaaactatcagcgccgatgacattcacagaaggaataaagaacgtactagctgccataacacactcctgaaagtgtaaaaaagggcgggcagcttactgaggattttcattcgaaaatatgatcagtattattgattatcaaaattaatctaataaaaagcacattgtattcattaaacaatgtgctttttttaaattcataagaattttgtattaatttattttaaaacttaattaatcatttccttatttttccggaaataataatgcgtcgcgcaataaatgatcatttccacgacgacgcgtaaagccaatgcggtcaaaatattccagaatctgaattgccagctttcggcctacgcctaagcgatcgcggaaatccgccgcgcaggtactaccacactcctgatcgagatcgcggatcatattggcaaactcgacaatccgatcgttacggtaataacgatctttaacgatcgcggtaattattccttgctgcgccgcctggcgtagagtcaggcgcattgcctgctcgtcggttcccgtctcttttgccaggtcacgcacccaccacggttcgtcaccaaacagtggctctgctttttgccagatggcctgctgctcttcgctgaagcccgctttgtgatctggcagatgcagccagccgtgatggctgtggatgtcgccgctttcgcgcatcttttcaatcagcaacagtaccagcgcttcatcttccattggcaacgccatacgtcgcagacgttcgcgcccagggccaggttcatcgcgatgttgctcatgataagtcgctaatgtgtcgagaattttccgctgccagcgggcggcaaccggcgcattcaacaagctataaccagcctgaatataaccaggctgttgcagcaattcgcgcatcccttcgccgttgagctggcgcgcccaggcgaaatccgcaaggttaaccgcgccgcgttccagatgaacagataacgcatcggcatcgctctgcgcccgtgcaagagacgccagccattgcagatattccggcttacgtttaccgcgacgcggcgggttaagcatcacgacgcgcgctccggccagcgtgttgcgggcagagatatcgcgcaataccaggcggtcgttatctgccagccataacggggtgtcgaagaccagttcagcaaggttatcttccagcagactaacgcgtcccgtgacgtggctggcggcgtggtgaatatgcagcggctgccactgggtcagcggtgtatgggtttgaagctcgacaatcacccgtgtgaacggctctggcggcacatcggcaagcagccagtcgccacggttaatctgctctttttccgcatcacccgcgatgttaagcgcgatacgctgcccggcattggcggtttctgttggctggttttgcgcatgcagcgcacgtacacgcatcggtttatttacaccagtcagccagagactatcgcctaccttcacttccccgcttaacgccgtaccggtgacgaccagcccggcaccttttacggtaaatgcgcggtcaatcgcgaggcggaaactatgttggctggcgtgctcgcgttccggcaactgaagcagatgctcgcgcagggcatccattccccgaccttcggttgctgcggtgataaacagttttgcctcagcaaaaccgtattcccgcagaacctcctttacctggcgttcaacctcatcaacacgcgcttcgtccacgcgatcggctttggtcagcgccactgtcagcatcgggttaccggtcagctgcaaaatcgccagatgctcacgggtctgtgccatcacgccgtcatcgcacgccaccaccaacagcgcgtgatcgataccaccaacgcccgccagcatgttggaaagaaacttttcatgaccgggaacgtcgataaaaccaggcacgcgaccatccggctgcggccagtaggcatagccgagatcgatggtcatgccgcgctttttttcttccggcagacggtcagcatttacgccagtaatcgcctgcaataaggttgttttgccgtggtcaacgtgtccggcagtcgcaataatcatttcaacaacatctccaaaaaccgttgctcatcttcaaggcagcgtaaatccagccacaatcgtccgtcataaatacgaccaatcaccggcactggcaattcacgccagcgggcggctaaactctcaaggtggctaccgcgtccatcatggggtgtaaacgttaatgccgcgctcggcaggcgatcaaccggcaggctaccactgccaatctggctaagacatggcataacctgtaccgcaaactccgcgccgtaatgtgcggcaaggggggcctgtaaacgttgtgcctggatttgaatgacctctgcgctgcgggtaagcaggcgcagggtcggtaatttttcactcagagcttcagggtgtaaataaagacgcaacgtggcttccagcgccgcgagggtcattttatccgcgcgtaatgcacgcttcagcgggtggctttgcaggcgggcgatcatctcttttttaccaacaataattcctgcctgcggcccgcctaacaacttgtcgccggagaaactcaccagactgacgcccgccgcaatcaactcctgcggcattggctctttcggcaaaccgtactggctaagatcgaccaggctgccactgcctaaatcagtcactacgggaacatccagctctttgccgagcgccaccagttccgcttcatctatcgctttggtgaacccctgaatgctgtagttactggtatgtactttcatcaacagtgcggtattttcattcaccgcctgacgataatcattcgcgtgcgtgcggttggtggtccctacttcgtgtagggtgcagcctgcctgacgcataacatcgggaatacgaaacgcgccgccaatctccaccagttcgccgcgagataccaccacctcttttccgctggcagtggccgccaacatcaataacaccgccgccgcattgttattgacgatacaggcatcttccgcccccgtaatacggcacagcagctgcgccagcgcccgatcgcgatgtccgcgtccggcgtcgtccagatcatactcgagggtcactgggctacgcatagcctgcgcaacggcttccaccgcggcttccgcctgtaaagctcgcccaaggttggtatgcagcacggttcccgtcaggttgatcaccggacgcagcgcgctctgcgcttctttcgtcaaccgggcatcgacttcttgcgcccagttttcacaccacgcaggcagcgtctggctgccacgaatcacttctcgcgcttcgtcgagcatctgacgcaacaattccaccacgcgggtgtgaccataagtatcacgcaaagaaaggaaggagctatcgcgcaataagcgatcaatagccggaagttgactatagagggaacgcgtttcggttgtcataggaaacctggctgatcaaggccctctcacacggagaagggcgtttaacataaccacggattgtaacgtgagatgggtcaggaggacatatcgcgcatcaagcctttggcggttcggtgcgagcaaaactttcgcggctaaacaggttttcgaccagtttgactaagtgtgggcggtcgacacaccaacctggcgcaacgcggcggaaattgagatatccgacggcacaggcaatggcgatagtcgccagattgaccgtatcggttttgagtgtgccatcgaccagatatccttccagcacatccagactgcggttgattttctcccgctggcgtaacaattcatcttcagactgctgcgccgctggacgcgcctgttcacgcacgcttaccagcccggcatccataatgccatccgccagtgcctcaattttgcgcacccgcaagctctccagcggatcgcgcggcaacatcgccggagcgacattcattaattcaatatattcagcgatgatcgggctatcaaaccagcattcgccctcttcggtcaccagcaccggcacttttcctaacgggttaaattgcgccacgccgttgtccgcgttatagggcagttcattaataaattcgaaagttatgcccttttctaacaacagaatagaaagtttgcgtacaaacgggctggtgtagctaccgacgagtttcatgccgagtcctttgtgcgaggaaaaatatcagtatggctcaatgatccaaataaagataatgcatccagctggtcattcttagcagcactttccgcatcacgctaacatggctgaaatggtcggagtaaaccgccacctgggcgtagatgccgtcgggtaaggcatcgatatcatcgttagggtccagttcaatggttcccagcacaccgtccgtgccgggcacgaccgttaaactttgcaataccccctgcgcctgataagaaccgcctggcacgacaggtaaaatactagtcagtttgccgtgaaacacctgcccaggtagcgcgttaaacaccacttccgcatcatcgccaggtttcagacgtaacaggctgttttgccgaaattgggcgacaatttgccgtttttgctcggggatgaagaccatcaccggacgcagcggcaaggcagctgcgtatgtacctgggcggatcagtacctgagtaacgtagccattgctcggcgcgcgaatgacagtctgctcaaggttatattttgcttcagtaagttgcgctcttaagctcacaatctggctttgctcgccgttaaccatactgtcgagctggctctggatctgcgcctgctccgccacgctgcctttcaccagcgcatcctgcgcgaggaaattttgccgcgcatcgtcgatgtcacgttcgctgaacggattcaccgccgcctggctgcctttcaagtaacgttgataatttttaaacagacggtcgcgctccgcactaacctgggtggtgttggcctgcgcttcagtgagctgcgcacgcagcgtctttatattatgcgtcgccgtcatcaggtcagcctgaagtctgtcaactcgcgcctggtaacgaaccgggtcgagcttaaaaagcacctcgcccttttgaataagctgattattcttgtcagtgacttcagtaacaattcccgtcacctgtggcgtgatagggatcgctatcactgccttttgcgcggtaaaagtgtaagggtggttgtagttcatcaacaaaatcaaaccactcaccagaaacacgcctcccagcgccgccgtcgccagcgtccactgatttaccggaatgcggaagattttaaagaccgcccacgccagcgccacgtaagttaaaacaatcaatagatccataattagatctccgggaacgtggaatagtcagtctttttctcggcggcgagttgatgctccaaccgggaaattcggtcagaaagtgcggcgatttccgggtcagtcgctttctcctggctcgcaacatgactctgcataccccagccacgctccggttgatagagcgtcgcccagatccacagaaacggccagataacatgcagagtaaacaggctcacccagcccgccgtatgaatagcgtcggcatggggatggttgcgctttttggcaatcagataagggatgtcatgtatcgcgatgattccataaaaaatcaccagaaagacgaagatcagcactcccaacgcgaaatagtttagaaacatatctgcctcggattcacgtttatcagtgttgtttttgggctggcagccagaagggagtcaggctgatattttgacaataatccgggttcgcgattctcgccataacaccaaagaataatttttagaggtgatgagttgcttagttacataacgattgtatgacgaaggcataacatgctgtagatcacatcaggtgaacgccgtaagaaaatatcttgtgattcagatcacaaagattcaacaaaccatcaaaacaaaaatgtgacactactcacatttaaatgccatttttagcgaaaatcgccgccttgttgcttttttacacaagcgttttgtgatgaacgtcacgtcaattacctctctaccccctatatttatgtgattgatatcacacaaaaggccgtcgactggacagttaaccgattcagtgccagatttcgcagtatctacaaggtccggctacctctgccgccacattaacaaaaaacctcgggcttccagcctgcgcgacagcaaacataagaaggggtgtttttatgagttccgatattaagatcaaagtgcaaagctttggtcgtttcctcagcaacatggtgatgccaaatatcggcgcgtttatcgcgtggggtatcatcaccgcgttatttattccaacagggtggttaccgaacgagacgctggcgaagctggtcgggccgatgatcacttatctcctgccgctgctgatcggttataccggtggtaagctggtaggcggcgaacgtggcggcgtagtcggtgccatcaccaccatgggcgttatcgtcggcgcagacatgccgatgttcctcggttctatgattgcaggtccgctgggcggctggtgcattaagcacttcgaccgctgggtagacggtaagatcaaatccggttttgagatgctggtgaataacttctccgcaggcatcatcgggatgatcctcgctattctggcattcctcggcattggcccgattgttgaagccctgtccaaaatgctggctgcgggcgttaacttcatggttgtccatgacatgctgccgctggcgtctatctttgttgaaccggcgaaaatcctgttcctcaacaacgccattaaccacggtatcttcagcccgctgggtattcagcagtcccatgaactgggtaaaagtatcttcttcctgattgaagctaacccaggtccaggtatgggcgtgctgctggcgtacatgttctttggtcgtggtagcgctaaacagtctgcgggcggtgcggcaatcatccacttcctggggggtatccacgaaatctacttcccgtatgtgctgatgaatccgcgtctgatcctcgcagtcatcctcggcggtatgactggcgtgttcacgctgactatcctgggcggtggtctggtttctccggcatctccgggttctatccttgctgtactggcgatgacaccaaaaggtgcttacttcgctaacatcgcgggtgtgtgtgcggcgatggctgtctccttcgttgtctctgctattttgctgaaaaccagcaaagtgaaagaagaagatgatattgaagcagcaactcgtcgtatgcaggacatgaaagctgagtctaaaggcgcatctccgctgtctgctggcgatgtgactaacgacctgagccacgtacgtaaaatcatcgttgcctgtgacgccggtatgggttccagtgcgatgggcgcaggcgttctgcgtaagaaaattcaggatgcaggtctgagccagatttctgttactaacagcgcgatcaacaacctgccgccagatgtggacctcgtcatcactcaccgtgacctgaccgaacgcgctatgcgccaggttccgcaggcacagcatattagcctgaccaacttcctcgacagcggcctgtacaccagcctgaccgaacgtctggttgctgcccaacgccacacggcaaacgaagagaaagtaaaagacagcctgaaagacagctttgacgattccagtgctaacctgttcaagctaggcgcggagaacatcttcctcggtcgcaaagcggcaaccaaagaagaagcgattcgttttgctggcgagcagctggtgaaaggcggttacgttgagccggaatacgttcaggcgatgctggatcgtgaaaaactgaccccgacttatctgggtgagtctatcgcggtgccacacggtacggttgaagcgaaagatcgcgtactgaaaacgggcgtcgtgttctgccagtacccggaaggcgtgcgcttcggtgaagaagaagatgacattgcccgtctggtgattggtattgctgcccgtaacaacgagcacattcaggttatcaccagcctgaccaatgcactggatgatgagtccgtcatcgagcgtctggcacacaccaccagcgtggatgaagtgctggaactgctggcaggtcgtaagtaatccaatcccaccctctccacatggagaaggtggggttaattgcctgatgcgctacgcttatcaggcctacaggatgcatcacaatttgttgaatttgcacgttcttgtaggccggataaggcgcttacgccgcatccggcgctgcccctctcctcacggagagggtttgggtgagggaaaagcctcaccccagccctctcgggtaaaaacattgatgaaggttaatactatgaaagcattacattttggcgcaggtaatatcggtcgtggctttatcggtaaactgctggcagacgcgggtatccaactgacgtttgccgatgtcaatcaggtggtacttgatgccctgaatgcccgtcatagctatcaggtacatgtggttggtgaaaccgagcaggtagataccgtttccggcgtcaatgctgtcagcagcattggtgatgatgtcgttgatctgattgctcaggttgatttagtcactaccgccgttggcccggttgtgctggaacgtattgctccggcaatcgccaaagggcaggtgaaacgtaaagaacaaggtaatgaatccccgctgaacatcatcgcctgtgaaaacatggtacgcggtaccacgcagctgaaaggccatgtgatgaacgccctgccggaagacgccaaagcgtgggtagaagaacacgttggctttgtcgattccgccgttgaccgcatcgtaccgcctagcgctagcgcaactaacgatccgctggaagtgacggtagaaaccttcagcgaatggattgtcgataaaacgcagttcaaaggcgcactgccgaacatcccaggcatggagttaaccgacaacctgatggcatttgtcgaacgtaaactcttcaccctgaacacgggtcatgctataaccgcgtacctcggaaaactggccggtcatcagaccattcgtgacgcgattctcgacgagaaaatccgcgcggtggtaaaaggtgcgatggaagaaagtggtgcagtattgatcaagcgctacggctttgacgctgacaagcatgcggcgtacatccagaaaattctcggccgttttgagaacccgtatctgaaagatgatgtagagcgcgtaggccgtcagccactgcgtaaactgagtgctggcgaccgtctgatcaagccactgctcggtacgctggaatatggtctgccacataaaaacctgattgaaggtattgccgctgcaatgcacttccgcagtgaagatgatccgcaggctcaggaactggcagcactgatcgctgacaaaggtccgcaggcggcgctggcacagatttccggtcttgatgccaacagcgaggttgtatccgaggcggtaaccgcttataaagcaatgcaataatggtggaccaggcgcaggacaccctgcgcccgaataacagattgagtgatatgcaggcaacaatggaacaaacccaggcctttgaaaaccgtgtgcttgagcgtctgaatgctggcaaaaccgtgcgaagctttctgatcaccgccgtcgagctcctgaccgaggcggtaaatcttctggtgcttcaggtattccgcaaagacgattacgcggtgaagtatgctgtagaaccgttactcgacggcgatggtccgctgggcgatctttctgtgcgtttaaaactcatttacgggttgggcgtcattaaccgccaggaatacgaagatgcggaactgctgatggcattgcgtgaagagctaaatcacgacggcaacgagtacgcctttaccgacgacgaaatccttggaccctttggtgaactgcactgcgtggcggcgttaccaccgccgccacagtttgaaccagcagactccagtttgtatgcaatgcaaattcagcgctatcaacaggctgtgcgaagtacaatggtccttagtctgactgagctgatttccaaaatcagcttaaaaaaagcctttcaaaagtaagcaacgtctgcttactgcccctctacctgcttcggccgataaagccgacgataatactccagacgttgtagatataacggcacgctttcatcgggtattccggacggaatcgcgttacggggaggaagttttttcagatactcccggaacgcctggctacttgccatgaaatctacggctttatcgataagaagcggaacgttttcacctaatttgcccatgatgatatctccgtattaccccgcgccgggaatgcgcggccgccaattttagtttaggttcccggtaaagatgacattaaggaaaacgtgctgaatcctcaataatcatccgctgctgtttattatcttttttctatagatttcttaattaatcaacgaattgcgcagtttttgagcatgttaatgattacgttacagaactattacaatgtcattagttgtgaacaaagcacctggtcgcgcatactaggggctataaatttatctttatcagaagccatcacatgaaagaagtcgaaaaaaacgaaatcaaacgcctcagcgatcgcctggacgccatccgccaccagcaggccgatcttagcctggttgaagccgcagacaaatatgccgagctggaaaaagagaaagccacgctggaagcagaaattgctcgcctgcgtgaagttcatagccaaaaactgagtaaagaagcacagaagctgatgaagatgccattccagcgcgcaattaccaaaaaagagcaggctgatatgggcaagctgaagaaaagtgttcgcggactggtcgttgtgcacccaatgaccgcactgggccgcgaaatgggcctgcaggagatgactgggtttagtaagaccgcgttttaagaacacagtatctacagggtgattctgcacattcctataggccgagtaaggtgttcacgccgcatccggcaagataaggcgctctggatcaacaacctaagggcaattctctgatgaggattgcccttttctttaccagacatctccccccacaagaattggccctaccaattcttcgcttatctgacctctggttcacaatttcccaattaaaactcacatcaatgttgccaatacataacatttagttaaccattcattgtcattatccctacacaacacaattggcagtgccacttttacacaacgtgtgacaaggagatgagcaacagactcattacacgatgtgcgtggactccaggagacctgcaatgaatctctggcaacaaaactacgatcccgccgggaatatctggctttccagtctgatagcaagccttcccatcctgtttttcttctttgcgctgattaagctcaaactgaaaggatacgtcgccgccagctggacggtggcaatcgcccttgccgtggctttgctgttctataaaatgccggtcgctaacgcgctggccagcgtggtttatggtttcttctacgggttgtggcccatcgcgtggatcattattgcagcggtgttcgtctataagatcagcgtgaaaaccgggcagtttgacatcattcgcagctctattcttagcataacccctgaccagcgtctgcaaatgctgatcgtcggtttctgtttcggcgcgttccttgaaggagccgcaggctttggcgcaccggtagcaattaccgccgcattgctggtcggcctgggttttaaaccgctgtacgccgccgggctgtgcctgattgttaacaccgcgccagtggcatttggtgcgatgggcattccaatcctggttgccggacaggtaacaggtatcgacagctttgagattggtcagatggtggggcggcagctaccgtttatgaccattatcgtgctgttctggatcatggcgattatggacggctggcgcggtatcaaagagacgtggcctgcggtcgtggttgcgggcggcagctttgccatcgctcagtaccttagctctaacttcattgggccggagctgccggacattatctctagcctggtaagtctgctctgcctgacgctgttcctcaaacgctggcagccagtgcgtgtattccgttttggtgatttgggggcgagtcaggttgatatgacgctggcccacaccggttacactgcgggtcaggtgttacgtgcctggacaccgttcctgttcctgacagctaccgtaacactgtggagtatcccgccgtttaaagccctgttcgcaagcggtggcgcgctgtatgagtgggtgatcaatattccggtgccgtacctcgataaactggttgcccgtatgccgccagtggtcagcgaggctacagcctatgccgccgtgtttaagtttgactggttctctgccaccggcaccgccattctgtttgctgcactgctcagcattgtctggctgaagatgaaaccgtctgacgctatcagcaccttcggcagcacgctgaaagaactggctctgcccatctactccatcggtatggtgctggcattcgcctttattagcaactattccggactgagtagtacactggcgctggcactggcgcacaccggtcatgcattcaccttcttcagcccgttcctcggctggctgggggtattcctgaccgggagcgataccagttctaacgccctgttcgccgcgctgcaagccaccgcagcacaacaaattggcgtctctgatctgttgctggttgccgccaataccaccggtggcgtcaccggtaagatgatctccccgcaatctatcgctatcgcctgtgcggcggtaggcctggtgggcaaagagtctgatttgttccgctttactgtcaaacacagcctgatcttcacctgtatagtgggcgtgatcaccacgcttcaggcttatgtcttaacgtggatgattccttaatgattgttttacccagacgcctgagtgacgaggttgccgatcgtgtgcgggcgctgattgatgaaaaaaacctggaagcgggcatgaagttgcccgctgagcgccaactggcgatgcaactcggcgtaagtcgtaatagtctgcgcgaggcgctggcaaaactggtgagtgaaggcgtgctgctcagtcgacgcggcggcgggacgtttattcgctggcgtcatgacacatggagcgagcaaaacatcgtccagccgctaaaaacactgatggccgatgatccggattacagtttcgatattctggaagcccgctacgccattgaagccagcaccgcatggcatgcggcaatgcgcgccacacctggcgacaaagaaaagattcagctttgctttgaagcaacgctaagtgaagacccggatatcgccagtcaagcggacgttcgttttcatctggcgattgccgaagccagtcataacatcgtgctgctgcaaaccatgcgcggtttcttcgatgtcctgcaatccagtgtgaagcatagccgtcagcggatgtatctggtgccaccggtttttagtcaactgaccgaacaacatcaggctgtcattgacgccatttttgccggtgatgctgacggggcgcgtaaagcaatgatggcgcaccttagttttgttcacaccaccatgaaacgattcgatgaagatcaggctcgccacgcacggattacccgcctgcccggtgagcataatgagcatagcagggagaaaaacgcatgattatttccgcagccagcgattatcgcgccgcagcgcaacgcattctgccgccgttcctgttccactatatggatggtggtgcatattctgaatacacgctgcgccgcaacgtggaagatttgagtgaagtggcgctgcgccagcgtattctgaaaaacatgtccgacttaagcctggaaacgacgctgtttaatgagaaattgagcatgccggtggcactggctccggtgggtttgtgtggcatgtatgcgcgtcgtggcgaagttcaggcagccaaagcggcggacgcgcatggtattccgtttactctcagcacggtttccgtttgcccgattgaagaagtcgcgccagccatcaagcgcccaatgtggttccagctttatgtactgcgcgatcgcggctttatgcgtaacgcgctggagcgagcaaaagcagcgggttgtagcacgctggttttcaccgtggatatgccgacaccgggcgcacgctaccgtgatgcgcatagtggtatgagcggcccgaacgcggcaatgcgccgctacttgcaagcggtgacacatccgcaatgggcgtgggatgtgggcctgaacggtcgtccacatgatttaggtaatatcagtgcttatctcggcaaaccgaccggactggaagattacatcggctggctggggaataacttcgatccgtccatcagttggaaagaccttgaatggatccgcgatttctgggatggcccgatggtgatcaaagggatcctcgatccggaagatgcgcgcgatgcagtacgttttggtgctgatggaattgtggtttctaaccacggtggccgccagctggacggtgtactctcttccgcccgtgcactgcctgctattgcagatgcggtgaaaggtgatatagccattctggcggatagcggaattcgtaacgggcttgatgtcgtgcgtatgattgcgctcggtgccgacaccgtactgctgggtcgtgctttcttgtatgcgctggcaacagcgggccaggcgggtgtagctaacctgctaaatctgatcgaaaaagagatgaaagtggcgatgacgctgactggcgcgaaaagcatcagcgaaattacgcaagatagcctggtgcaggggctgggtaaagagttgcctgcggcactggctcccatggcgaaagggaatgcggcataatcgtttgcgccccctcaccctaaccctctccctcagggagaggggaccgttcggcgctgtatgtactccctcactctgaaacgacaccgcactctttttttctccctcgcccctccggggagagggccggggtgaggggaaaaggccgcactgctcaccaattttctgctatcctgcccccgcactaagggggcagtatgctaaacatcgtactttacgaaccagaaattccgccaaatactggcaacatcatccgtctttgcgctaataccggctttcgtctgcatatcatcgaaccgatgggatttgcctgggacgataagcgcctgcgccgcgcggggctggactatcacgagtttaccgccgttacgcgtcatcatgactatcgcgcgttcctcgaagcagaaaatccccagcgcctgttcgccctcaccacgaaaggtacacctgctcacagcgccgtaagctatcaggatggcgattatctgatgttcggcccggaaacacgcggcctgccagcgagcattcttgatgccctgcccgctgaacaaaaaattcgcattccgatggtgccggacagccgcagcatgaatctgtccaatgcggtgagcgtagtggtgtatgaagcctggcggcagttggggtatccgggagcggtattgagagattaattactgtaggccggatagatgattacatcgcatccggcacgatcacaggacattagatcccatccccatactcaaatgtatggttaataccgttgaaatgctggtccatatccatacttggcttatcgctgtctggtttaccgacaatacgagccggaacgccagcggcggtggtatgcggcggcaccggttgcagcaccacggaacctgcgccaatcttcgcgccgcgcccaacttcaatattgccgaggattttcgcgcccgcgccaatcatcacaccttcacgaattttcgggtgacggtcaccaccagatttacccgtaccgccaagcgtcacagattgcagaatgcttacgtcgttttcaatcaccgccgtttcaccaacgacgatgcctgtcgcgtggtcaagcatgataccgcgaccaatttttgctgccgggtgaatatcgacctggaacgtcacagaaacctggttttgcagaaagattgccagtgcgcgacgcccctgattccacaaccagtgaccgatgcgataggcctgcaaggcatgaaaacccttcaggtataacaacggggtactgtatttatcgactgccgggtcgcgggtacgcaccgcctgaatatcacaggccgcagaggcgatcatttccgggtcagcggcgtaggcttcttccaccacttcacggatagcaatagcaggcataattgggctactcagcttgttcgccagcatgtagctcagtgcactgccaaggttttcgtgcttgagtagcgtcgcgtggtaaaaactggccagcattggctcacagtccgccagcgttctggcttcggctttaatattgttccagacaatttccagttcttcacagctcattgcttactccacacgatgagataatgaccggcccgttctgcgcgggccgggtcatagcggtaacaaaggttccctggggttagtggctgctgcgctcgtccttgcgtgcacgacctagtaaagtcaatgctgcctcgcgcgcgttttttccgcaatataatacttgataaatttcctcggttattggcatttcaacgccgaagcgatgcgccagttcgcggacttctttcgtattgcggtagccttccaccacctgaccaatcttctcctgcgcgctttgtacatccatgccctgaccgagcatcatgccaaaacggcggttacggctctggttgtcggtacaggtaagcaccagatcgccaagccccgccatgcccataaaggtggcagggtcggcacccagcgccgcaccaagacggctcatttcagccagcccacgggtgatcagcgccgtacgcgcattcgcaccaaaaccgataccgtcggacatccccgcaccaatggcaataacgtttttcaccgcgccgccaagctgcacgccaatgaaatccggattgctgtaaacgcggaaacttttgccgcagtgcagcagctgctggagatcatcggcaaaggtctgatcggtgctggccaggctaatagctgtcggtaaacctgccgccagttctttcgcaaacgttgggccagagataaccgccagcggaatttgatcgcctaaggcctcacgcgccacgtcctgtaacagacgtccggtttccgcttccagccctttggtcgcccacaccagacgcgcatcaggacgcatcagtggtttaatctggcgcagcacttcaccaaagacatggctgggtacgacgacgagaatattacggctggctgccagcgcagtggcgagatcgctttcaagatggagcgtatcgggaaaaggcacatcggggagaaacgcggcgttacagcggtcgcgttcaagcgttgcgatatgttcagggtcatggccccagaggacaacctcgtggccatttcttgccagggtgatggcaagagcggtgccgtagctgccggcaccgatcacagtcatactagcattacgttggttcatcaggcatcctgatgttcttcagtaccttcgccagcctgctgctgcaaatagttcatgaacagcgcatcgaagttaaccggcgcaaggttcagttgcgggaatgtaccgcgggataccatgctggtgatgcactcacgagcatacgggaacagaatgttcgggcagtatgctcccaggcaatgcgccatctgggtgccttcgatacccgcgatggagaaaataccgccctgctgaacttcacacaggaacgcggtttcttcgcccaaagaggccgttacggtaacacgcagtaccacttcgtatacgtcatctgccagttgggaagatgccgtatccagatcaagtttaacttctggttgccaatctttctggaaaacgtgcggcgcgttcggcgcttcgaaagagatatccttggtataaatacgttggatctggaaagtcatttcagtgttgttttgttcactcatgtgtagaaaacccttaagtgttgtccttaaatactgcgcaatgtaatgccaacgttcacacgttatttcagcaggggatccagtccaccacgtgcatccaatgcatacaagtcatcacagccgccaatgtgctgtgcgtcaataaaaatctggggaaccgtggtgcgaccgctgcgtttgatcatctcttcacgcttggcggcgttgccatcgatcggcagctcctggaaactcacgcccttgctgctcagcagtgcttttgcacgatggcaatacgggcaggtttctttggtatagatttcaacattggccataaattagctcctgtttttttaccctgaaatttcatgttgcagggcggcagcaaaatggagtgtccccagaagcttataacaataagtcgctgggggcctaattgcagctaacggcctgcatcatgaaagacgacaggtaaattatttgccgcgcaccaaaggcaagttttcgccagcccagccagcgacgccttctttcagcacgaatacttgcgcaaaaccagctttcgtcagtgcgtttgcaggctcctggcactgcatgccagaaccgtctaccacgataaccggtttgtctttgtgcttctcaagctcaccaacattgttggctttgatttcgctcggcaacagattaatagaacctgcgatatggcctttacggaagtcatcacgctgacgtaaatccacaaccacagcgtcttctttgttgatcagacgcgtagcttcaccacgagtaatcaccttcactttgctggtcaggctcttaaacgtagtcacaagaaccgccaccagtaacgcgatccaggcgatactcagtatgggatgacggccaacaaattgcataatttcttgcatggggggtaacaactcccgacgtagtgattaaaaaaaccaggaaaggagtatacctgcgcggtgcggcaaatacagccagcgcgttaactggaatgcaattttgcggggcgcgacgaaaaaaaagcgtaaatctggcatcggcttgccgcgagcggtcgtatattttgatcttcagaggctattttatcgattcagctgtagtaaaattacgcaaattttgactcttgagtatgaggttgtcgcaatgttggtttctaaaaaacctatggtactggtgattctggatggctatggctatcgcgaagaacagcaggataacgccatttttagtgctaaaaccccggtaatggatgcactgtgggccaatcgtccgcataccctaatcgacgcttccggtctggaagtcggtctgcctgaccgtcagatgggtaactccgaagtaggccacgttaacctgggtgccggccgcatcgtgtatcaggacctgactcgtctggacgttgaaatcaaagatcgcgctttctttgctaatccggtgctgactggcgcggtagataaagcgaaaaacgcaggcaaagcggtacacattatgggtctgctctccgcaggcggcgtacacagccacgaagatcacatcatggcgatggtagaactggcagctgaacgcggcgcagaaaaaatctacctgcacgcattccttgacggtcgcgacactccgccgcgcagtgctgaatccagcctgaaaaaattcgaagaaaaatttgccgcgctgggcaaaggccgcgtagcgtccatcattggtcgttactacgcgatggaccgcgataaccgttgggatcgcgtagaaaaagcttatgacctgctgactctggcgcagggcgagttccaggccgataccgccgttgctggtttgcaggctgcttatgctcgcgacgaaaatgatgaattcgtgaaagcgaccgttatccgtgctgaaggtcagccagacgcggcaatggaagacggcgatgcactgattttcatgaacttccgtgctgaccgcgcgcgtgaaatcactcgtgctttcgtgaacgctgatttcgatggcttcgcgcgtaagaaagtggttaacgtcgatttcgtgatgctgaccgaatacgccgctgacatcaaaactgcggttgcttacccacccgcttccctggttaacaccttcggcgagtggatggcgaaaaacgacaaaactcagttgcgtatttccgaaaccgaaaaatatgcccacgttactttcttcttcaacggtggcgtagaagagagcttcaaaggcgaagatcgcattctgatcaacagtccgaaagtggctacctacgatctgcaaccggaaatgagctccgcagagctgaccgaaaaactggttgcggccatcaagagcggcaaatacgacaccatcatctgtaactatccgaacggcgacatggtaggtcacaccggggtgatggaagcggcggttaaagcggttgaagcgctggatcactgcgtggaagaagtcgcgaaagcggttgagtccgtgggtggacaactgctgatcaccgctgaccacggtaacgctgagcagatgcgcgatccggcaacgggtcaggcacacacggcacacaccaacctgccagttccgctgatttacgttggtgataagaacgtgaaagcggttgaaggcggcaaactttctgacatcgcgccgaccatgttgagcctgatgggtatggaaatcccgcaagagatgactggtaagccgctgttcatcgtggaataatccctccccatgaggggaaaggcgattaataccatgacacgggccgtgaaaccgcgcaggtttgcaatcaggcccatcatctacgccagcgttcttagcgctggcgtattgttgtgcgccttttccgcccacgcggatgagcgtgaccaactcaaatctattcaggctgacatcgccgcaaaagagcgcgcggtacgccaaaagcaacaacaacgcgcaagcctgctcgcacaattgaaaaagcaggaagaagcgatctctgaagccacccgtaagctgcgcgaaacgcaaaacacgctcaatcaactcaataaacagattgatgagatgaacgcgagcattgccaaactggagcagcaaaaagccgcccaggagcgcagcctcgccgcacaactggatgccgcattccgtcagggcgagcataccggtattcagctgattctcagcggtgaagaaagccagcgtggacagcgtttacaggcttatttcggctatctcaaccaggcgcgacaagaaaccattgcccagttgaagcaaacgcgtgaagaagtcgccatgcagcgtgctgaactggaagagaaacagagcgagcaacaaacgctgttatatgagcagcgcgcccaacaggcgaaactgactcaggcgctgaacgagcgtaaaaagacgctggcagggctggagtcttccatccagcaaggtcagcaacagttgagcgagctgcgcgccaacgaatcccgtctgcgtaacagcattgcccgtgcggaagccgcggcgaaagcgcgtgcagaacgagaagcacgtgaggcccaggcggttcgcgaccgccagaaagaagcgacgcgcaaaggcaccacctacaaaccgaccgaaagcgaaaaaagcctgatgtcccgtaccggtggtctgggcgcgccgcgtggtcaggcattctggccggttcgcgggccgacgctgcatcgctatggcgaacagctacagggtgaattacgctggaaaggtatggttatcggtgcttctgaaggtactgaagttaaagcgattgccgacggtcgggtgattctggctgactggctgcaaggctacggtctggtggtggtggttgagcatggtaaaggcgacatgagtctttacggctataatcagagcgcactggtgagcgttggtagccaggttcgcgcgggccagccgattgcactggtgggcagcagtggcggtcagggtcggcctagtctctatttcgaaattcgccgccagggtcaggcggtcaatccacagccgtggttgggaagataagttttgtttccatttcgtcgtaacgttcttgcatttgccgctctgttggcgctctcctcccccgtacttgctggcaaacttgccatcgtcattgatgattttgggtatcgcccgcacaacgaaaaccaggtgctggcgatgccttccgctatctccgtcgctgtattacccgatagtccgcacgccagagagatggcgaccaaagcgcataacagcgggcacgaagtgttgattcatctcccgatggcaccgttgagtaaacagccgctggagaaaaatacgctacgcccggagatgagcagcgacgaaattgagcgcattattcgtagtgcggtcaataacgtgccctatgccgtggggatcaacaaccacatgggcagcaagatgacctctaacctgtttggtatgcagaaagtgatgcaggcgctggagcgttacaatctttacttcctcgacagcgtaaccatcggtaatacccaggcgatgcgcgccgcgcaaggcactggcgtgaaggtgatcaaacggaaggtattcctcgacgatagccaaaatgaagcggacatccgtgtgcaatttaatcgcgcaattgacctggcgcgtcgcaacggtagcaccattgccattgggcatcctcaccctgcaacggtacgcgtgttgcaacagatggtttataacctgccgccagacattacgctggtgaaagccagcagcttgctgaatgaaccgcaggttgatacttctacaccgccgaaaaacgctgtgcctgatgcaccgcgtaatccgttccgtggcgtgaagctgtgcaaaccgaagaaaccgatagaacctgtttatgctaatcgcttctttgaagtattaagcgaaagcatcagccagagcacgctgatcgtttacttccagcatcagtggcaaggctggggcaaacagcccgaagcggcgaagtttaacgctagcgcaaattaattagcgcaaattaaaggcgctacgcgtaatgcgatggtggctccgcgttttgtcgcgccattgccataagcggaaagaccacagtaacgcctggtaaccgaccttcacgctgcgcacattggtaatcaggcgcttatacataccggaagtaaatatctcggcaatcatccgttggcgggtaagaatatccggctctttgcgcaccgcatggcaaacacgcaatgcctcgtaagttatttgctgatgaaattccggataaatcataattttgtcggcataatttcgatttaatttctccagcaggcgggtaatcttaatatagtgacgttgataattaaggtttttattcccttgtctatgcaaccgactcacactcgtattatgcagataatatttatataaactttgctcggtatatcgcgcacgcagcgcgttaaacatgaattctgttgtccagacaatatcctgatgatgtaatccggcaataaatttaatgttatttttaacaataacatcacggcgataaacccccatccagacaacgtgagtccaacggcggctagaaagccccatccgcagccagtccgggccggttaatacgccggtactgcgaaggcgatcggtggggatggattgccaggtttctcccgtttcacgaaaacaccagtcagcgttgcactgcgccacgtcgaggtcgtcctctaacgccatggtcatcagcgtttcgtacatggtgggatagacttcatcgtcagcatcgacaaaagcgacatatttgcccgttgccacttcaatcccacgattacgcgccacgcttgcgccagcattcgcctgatgcaacaaacgaacgtgcggatagttttctgcgtaatactttgctatttcaacagaattatccgtactaccatcgttaataataatgatttccagagcagtccaggtttgcgtaattaaagattccatacaagtgcggaaatcatcgcccgcattatataacggaataataacactaagtttattggtgctgttcatcataaattaccgacgacctctgaagttatcctgacgttttacaggctttgtattaagaaactattaagcctgtgagatattatttttacaggtgagagagtcacttcagggtagagagataatgagagcagctatataagagatcagcacaattacgaactctttattacactgacaggattttacatatttaacagattatcctcagataaaagggctggaataccagcccttgttcgtgttaatcccagctcagaataactttcccggactggccgctacgcatagcgtcaaagcccttctggaaatcatcgatagagaaacgatgggtaatgatcgggctaagatcgaggccagactgaatcagcgccgccatcttgtaccaggtttcaaacatctcacgaccgtaaatacctttaatgaacaagcctttaaagatcactttggtccagtcgatagacatatcagacggcggaatacccagcatcgcaatacggccgccgtgattcatggtgtcaagcatggtacgaaacgctggcggcgcaccggacatttccagaccgacatcaaaaccttcggtcatgcctaactccgccatcacgtcattgagattttctttggcgacgttaaccgcacgggtgatacccattttacgcgccagctcaaggcggtattcgttaacatcagtgatcaccacattgcgtgcaccaacgtgtttcgccaccgccgctgccataataccaatcgggcctgcaccagaaaccagcacatcttcgcccaccagatcaaagctcagcgcggtatgcacggcgttaccgaagggatcaaaaattgcggctaagtcatcggaaatattgtcggggattttgaaggcgttgaatgccgggatcaccagatattcggcaaagcagcccgggcgattaacaccaacgcctatcgtgttgcggcacaaatgggtacgaccaccacgacagttgcggcaatgaccacaggtgatatggccttcgccagaaacgcgatcgccgatcttgaagcctttcacttcctgaccaatacctaccacttcaccgacatattcatggcccacgaccatcggcaccgggatggttttttggctccactcatcccagttatagatgtgaacgtcagtcccgcagatggctgttttacggattttaatcagcagatcgttatgcccgagttccggtacaggaacgtcggtcatccagatgccctcttccgctttcagtttggataacgctttcatctcacatcctcaggcgataacgcccagttgtttaccaatacgcgtaaatgcttctactgcacgcgtaatttgctcaggggtatgcgccgcagacatctgggtacgaatacgcgcctgacctttcggaacgaccggatagaagaaaccggtaacgtaaatgccctctttttgcagctcacgggcaaatttctgcgccactaccgcatcaccaagcatgaccggaataatggcgtgatcggctcccgccagggtaaagcccgccgcgctcatttgctcacggaactgacgcgcgttcgcccacagacggtcacgcagttcgctgcccgcttcgaccatctccagtactttgatggacgcggcaacaatggccggtgccaggctgttggagaacaggtacggacgagaacgctggcgcagccactcaaccacttctttgcgcgccgcggtataaccaccagaagccccgcccagcgctttaccaagcgtaccggtgataatatcgacccggcccatcacatcgcagtattcatgggaaccacgaccattttcaccgacaaaaccgaccgcgtgggagtcgtctaccatcaccagggcatcatatttatctgccagatcgcaaacgcccttcaggttggcaatcacgccgtccatactgaacacaccatcggtggcgatcagcacatgacgcgcaccggcttcacgcgcttctttcagacgtgcttccagctcctgcatatcgttgttggcatagcgatagcgtttagctttgcacagacgcacaccatcaataatagacgcgtggttcagtgcgtcggagataatggcgtcttccgcacccagaagcgtttcaaacaggccaccgttagcatcaaagcaggaagagtagagaatcgcatcttccatccccaggaaggccgccagtttttgttcaagctctttatggctgtcctgagtgccgcaaataaaacgcacgctagccatgccgaaaccgtgagaatccattcccgcctttgccgccgcaatcagatcaggatgattcgccagcccgagatagttgttggcacaaaagttaatgacgtggcttccatcagccacagtgatatctgcttgctgcgcagacgtaataatgcgctcttctttaaacaacccttccgcccgtgcggtttccagatcgttggttaactgctgataaaattctccacgcattgcgattctccagacagggcaaattccagcacatattacccaaacttataggtcgcgacgagataacgcgttaacacttctgcaaaattcaggataaataacgtgtaacttgatgtctctcaacacctacagatagtagaaaaactgtacagttttggctgggcataatgatgattgattttactgcattgatataaaaagaaaaaatgatgccaaagcatcatttttcctatctcagttggtatcaaaacgctacccactaatggagggaaacttattttctactaaggaaaattctcagcgcctgcatttttgcccctaaagtgttactcctgaagcagcgaaacaaatcgaaccattttcctctccccagatagtttaggttgaagagatcggggcgtttgtaatagcacatgacaaaaatgccctggtcatcgtccacaatgttattatttagtgttattttttgactttccagaactaatttatagaattctttccatttatgctgactaccaacaattgcgcccccaataatatatacatgattgccaatcatgaaatcaaaaacctgttgttgagatgtgacagtaagccctttttttatagtgaaaagatgcatcttactttcatcaaatgggaaatcccaaattttcaatcctcgagttacatttggcttatggcaatagccaaaatctatccacgcaacaagaggcgttttcactaagcccatgttgatagctttatttacaaaataggccttaaggttacataccaaaacatactctggactccagtactctgggttttttaattgtcgaggctcaagtctatttgtaaagctctcatctttttgaattttttcgatacgacttctgatatatctaaatttcttttttatatcgataacgataaccgttgttggttttccgttgcgaatcgcttcaacccttggtttcaaatcgggagaagtgaaaataatcatctcattttcaagtgcggccagacgctcaaagtaactaaaataaacatcaacactacgagctagtttttcacggaaccctttattagcagtccaatcccctctaccaatgtcaaaatatgcagtgataattgtggtggaacttttcattactaataagaccattaatataaaaaaagaattatatcataaatattaatagaatgtatactgtatattatccattcaaatgcttccgttatttatcatacatcggaatattgatactaaagcactattcacatgcaaaaccaacatccgccatgaaggactagctaaaacccaaactagtttgttgcaattagcatccttgcacctctatgtaaagggctgaagggattcggatgtgatggtatgattacagacattcgtgtctgagattgtctctgactccataattcgaaggttacagttatgatcatcgttaccggcggcgcgggctttatcggcagcaacatcgttaaagccctgaatgataaaggcatcaccgatattctggtggtggacaacctgaaagacggcaccaagtttgtgaacctggtggatctgaatatcgcagactatatggataaggaagacttcctgatccagattatggctggcgaagagttcggcgatgtcgaagcgattttccacgaaggcgcgtgctcttccaccaccgagtgggacggcaagtatatgatggataacaactatcaatactccaaggagctgctgcactactgcctggagcgtgaaatcccgttcctgtacgcttcttccgcagccacctacggcggacgcacctccgactttattgaatcccgcgagtacgaaaaaccgttgaacgtctacggttacagtaaattcctgtttgatgaatatgttcgtcaaatcctgcctgaagcgaacagccagattgttggcttccgttatttcaacgtttatggaccgcgtgaaggccataaaggcagcatggcgagcgtcgctttccatctcaacacccagcttaacaacggtgaaagtccgaagctgtttgaaggtagcgagaacttcaaacgcgacttcgtctatgtgggcgacgtggctgatgtgaatctgtggttcctggaaaatggcgtttccggcatcttcaatctcggtactggtcgtgcggaatccttccaggcggtagctgatgctacgctggcttatcacaagaaaggccagatcgaatacattccgttcccggataaactgaaaggccgctatcaggcgttcactcaggcagatctgacaaatctgcgcgcggcgggttacgacaaaccgttcaaaaccgttgctgaaggtgtaacggaatacatggcctggctgaatcgcgacgcataagagctctgcatgaaaatactggtgatcggcccgtcttgggttggcgacatgatgatgagccaaagtctctatcgcacgctccaggcgcgctatccccaggcgataatcgatgtgatggcaccggcatggtgccgtccattattaagccggatgccggaagttaacgaagctattcctatgcctctcggtcacggagcgctggaaatcggcgaacgccgcaaactgggtcatagcctgcgtgaaaagcgctacgaccgcgcctacgtcttacccaactccttcaaatctgcattagtgcctttcttcgcgggtattcctcatcgcaccggctggcgcggcgagatgcgctacggtttactcaacgatgtacgcgtgctcgataaagaagcctggccgctaatggtggaacgctatatagcgctggcctatgacaaaggcattatgcgcacagcacaagatctgccgcagccattgttatggccgcagttgcaggtgagcgaaggtgaaaaaagttatacctgtaatcaatttagccttagtagtgaacgtccgatgattggtttttgcccgggtgcggagtttggtccggcaaaacgctggccacactaccactatgcggagctggcaaagcagctgattgatgaaggttatcaggtggttctgtttggcagcgcgaaagatcatgaagcgggcaatgagattcttgccgctttgaataccgagcagcaggcatggtgtcggaacctggcgggggaaacacagcttgatcaagcggttatcctgattgcagcctgtaaagccattgtcactaacgattctggcctgatgcatgttgcggcggcgctcaatcgtccgctggttgccctgtatggtccgagtagcccggacttcacaccgccgctatcccataaagcgcgcgtgatccgtttgattaccggctatcacaaagtgcgtaaaggtgacgctgcggagggttatcaccagagcttaatcgacattactccccagcgcgtactggaagaactcaacgcgctattgttacaagaggaagcctgacggatgcgggttttgatcgttaaaacaagcagcatgggcgatgttctccatacgttgcccgcactcactgatgcccagcaggcaatcccagggattaagtttgactgggtggtggaagaagggttcgcacagattccttcctggcacgctgccgttgagcgagttattcctgtggcaatacgtcgctggcgtaaagcctggttcagcgcccccataaaagcggaacgcaaagcgtttcgtgaagcgctacaagcagagaactatgacgcagttatcgacgctcaggggctggtaaaaagcgcggcgctggtgacgcgtctggcgcatggcgtaaagcatggcatggactggcaaaccgctcgcgaacctttagccagcctgttttacaatcgtaagcatcatattgcaaaacagcagcacgccgtagaacgcacccgcgaactgtttgccaaaagtttgggctatagcaaaccgcaaacccagggcgattatgctatcgcacagcattttctgacgaacctgcctacagatgctggcgaatatgccgtatttcttcatgcgacgacccgtgatgataaacactggccggaagaacactggcgagaattgattggtttactggctgatagtggaatacggattaaacttccgtggggcgcgccgcatgaggaagaacgggcgaaacgactggcggaaggatttgcttatgttgaagtattgccgaagatgagtctggaaggcgttgcccgcgtgctggccggggctaaatttgtagtgagcgtggatacggggttaagccatttaacggcggcactggatagacccaatatcacggtttatggaccaaccgatccgggattaattggtgggtatgggaagaatcagatggtatgtagggctccaagagaaaatttaattaacctcaacagtcaagcagttttggaaaagttaagtagtttataaaggtaaaacatgctaacatcctttaaacttcatagtttgaaaccttacactctgaaaagtagtatgattttagagataataacttatatattatgtttttttagtatgataattgcattcgtcgataatactttcagcataaaaatatataatatcactgctatagtttgcttattgagtctaattttacgtggcagacaagaaaattataatataaaaaaccttattcttcccctttctatatttttaataggcttgcttgatttaatttggtattctgcgtttaaagtagataatagcccatttcgtgctacttaccatagttatttaaatactgccaaaatatttatatttggttcttttattgttttcttgacactaactagccagctaaaaagtaaaaaagagagtgtattatacactttgtattctctgagttttctaattgctggatatgcaatgtatattaatagcattcatgaaaatgaccgcatttcttttggtgtaggaacggcaacaggagcagcatatagtacaatgctaatagggatagttagtggcgttgcgattctttatactaagaaaaatcatccttttttatttttattaaatagttgcgcggtactttatgttctggcgctaacacaaaccagagcaaccctactcctgttccctataatttgtgttgctgcattaatagcttattataataaaagtcccaagaaattcacttcctctattgttctactaattgctatattagctagcattgttattatatttaataaaccaatacagaatcgctataatgaagcattaaatgacttaaacagttataccaatgctaatagtgttacttccctaggtgcaagactggcaatgtacgaaattggtttaaatatattcataaagagtccttttagttttagaagtgcagagagtcgcgctgaaagtatgaatttgttagttgcagaacacaataggctaagaggggcattggagttttctaacgtacatctacataatgagataattgaagcagggagtctgaaaggtctgatgggaattttttccacacttttcctctattttagtctattttatatagcatataaaaaacgagctttgggtttgttgatattaacgcttggcattgtggggattggactcagtgatgtgatcatatgggcacgcagcattccaattatcattatatccgctatagtcctcttactcgtcattaataatcgtaacaatacaattaattaagaataaacaagtttaagaagtgagttaaaactcacttcttatctatacaacttaatctctttacactattagttaaagtttcagtatcgatatcttttaccgtatatgttggggatactatttgtatagatttatgatgattcggggaccaaattaaatggctgggatattccggagtacgactattagggtaaaatgcaagcgttggtttatgataagccgcagcgatatgaacaagagctgtatcaacagaaatgacaaaatcactatacttggtcaacgcaacggtataaataaactcatcaaatggtagtgtttcgatttcaagtattggtattgtcaataaatcttgcggtaacccggtaaatataatccgataattttcaaagtgtgttttcacttcttgatatataacttttatttgctcaaacgtaagacggcatattttttttgcacctaatggattaataatgactattcttgtatctccaataaattcttttattttatcttcaacatctactggtaaatgcaagtcgtagttggtggaaaatttaccctcaccataaatatgcttcagtatttctattgctcgtgtactcatatgttcttttaaacattcatcgtggggatggtaaaaactatagtaacgcttataccaatgatcaaaacccagaatgtaagaatcttttaaactacttaatattaagctatgcttaaaactgggcatagtttcaaaggggtctaatacaatatcgaactgtaaatcccgcagatgcttacatagagtaagcatttcaagaaaaccggtactttctttaatacagaactcaaatatatttttattattagagagaaattccccaccctttctatttgtgagaagagttattttaacccctttactataaagttcacgataaatgctacttaatacaattagatcaccaagtttattattatcatgaataataaggcaacttttaacttgtgctggatctgtaatttgattatttattttattacgaaataaaaaagaaaggaaattaatcttgattttgtttatataaaatcttttctttttgtgaaaagttcctaagcgcatttttataccatattattttagtttcaggatgattaattagcataagaatcggtactagttctatattgcattttttttcttgtcatatctttactttcttctgcactgatgtcttgaagtttaataaatggaattacatcgtaagaaatagctgtatcatcacttaaattataaatattaatatcttttacattatcatgcataaaacgaaaaaatggcaatattttgaataaatccctacttaattcgctgggcatgggatttttattctcatcatagaaacgagaacagctacccgttaaatcaagaccagaacaaataatccgcgcatacttaagactatatgcgatttgaattgcagcaaaggcaatagtatggcaactgcaataaccaagactaatgtccttgcaaaatccaaccagacgaccttttttagacaacggtacagagatcagcagttctttgtgaatctgtctcaaaatattaaatttaatcttctttataaaaccacctttttcccgacggtaaaaggaccgtaatacgaggcagttctggaggatataaagtttatcttctttggaagcgtgttcataaacgtcaacgtttactatggtataacgacttctctggctaaatttataaaaatcatcacgacgctgatgtaaaaatcggacatctgtaagtacatatataaaaggaacgatattattacttaacagatattgcgcagaaccattgacagcaataatatcctttgttcgtaatacactcaaaggtgttttttggcttgtagggccgctaagaaaaataataacatcatcagatattttattttcaatcaggttttcaacatcttttttgtcaatgtatctaatattcttcatgataaacctgtgaaataaataactccgcttaaaactgtcctggtgaagacatgtaattgtgggattttttttagcgcgctggtttccctttcaaacgccgcataaaattgcgcatttttttacgatatactaaaagataatagcctagatctctaatctcatttttaataccgtaatgacgctctaagtcaatacgatctttcgctttacgctgcgcactagcacgctttccggagagatcgataattcgaacctcaccattttttataatgaagttaccacgatgggggtcgccagaaaccatgccatgttgatgtaaggcattaatactttgctgaattttattttttagcgcatcatcaatatcgggcatatcacacaactctatgccatcaatatactcgatgatcatgatataagtatggacaaaacgtaaggttttccgttcagccaataaataaaagtcattgagtgtatttaacccttcatttcgtactttttgggtttgctcaaaaaggcgttcgtaataatcaccttttaacagagacttaaagaaacgttcgttacgcttaactttcggagaaaaaaccttaagaatcaatttaccgtaatcggtatcaataagcataacttttgtatcatcaatagaacgaaaaaccttgatgatatttatattataagacaagaagtcatttaatacattgaggtacttactattgttttcatcggtaaaaacaaccaagtctttgatcttgctcttctgaatcataataaaccagttaaatgttatttacggtaatattttcggcaaagataacagactcctgctataattcctgagatataatgatgttgcactaaaagatgtttatatcttttttaaattcaataattgatttcgcatctcgtggagagtcatctttccagggggaattttctaaagctattttatagtattttaccgatggataaattgcccatttgtgccacggtttagttgcacctgtataatgaataagaagagtactttctgtaatcagctttttatagttttgatgtgttttgtcttttaattcacttttaattgtataaattgtattgtactcacgaggcaaaaataatgtcatccctttcagtaagacattcataacatcctgatcagggtatttataaacattatctttactcataagaatagacaacgctttttctgttagttttgcgtcagcccattttcttaagtctaaataaacgacaccggaattaaagtactgcccaagtaattcaggatcagacaacctggataccgccttttcttgcattggctcaacatctttaacaacagcagcaaccgctccatttaaacccagatgtaatagttggctaatatcgcctttacaaacaacatctgcatcaagataaagcaaacgatcaagcgttaaacccaataattgaaatgcaaataaacggaagtacattgctcttgaccagacctgtgtacaaggcaagcactggagcttatcagtgttaattctatataacgtgattcttaattggttttgctctgcaagctttgcaattttttgaaaaaaaccatcattataaacatcagcaataatataaaaatcaagattaatatgtcgattatttaggacaattgatgtgatggaaacacctacaccatcaagataattagcatcgacaccataggcaacatttaaacattcagaagtatttatattagctagccgaaaatcccaggctttaactttatctatctctatggcaggaaatgagtccacaatgctacccttatatcattactttatagtttcccagttttaatgctttatcttttcaataaaataaaaaagatagttgctaaatccttttagatatctatgctttttaagcatatgttttgcgctatatcttaattgattgctattgttcggtttcagcaacgccgtattcttccatgggctagcattttttgcctccataaaggcttgacttacaggataatcccaggcccaatcatgccagggcttggttggcccgatataatggataaaaatagtatcgttggttactgggtttataaagctttctttgagttgataatttaagctgaactgggtgttatatttaatatcagcgaaaataagtttatccgccagcaacatatttaacacatcctgatcaggatgtgttatttttttgattatttctggctcatttagcattgcaatagctcgtgcagaaacctgctgagccgcccattgggcagtattaatcaataaaaaaccggagttaaagtaacctttagcaattcccgcaacacctaagctatgggcgcgtttttcccaccagtcagcttgcccttctgtaacaaccattgcgactttatcgtcaggaaaactgaaattaattagtggctcaatagtcccctgacaaatgatatctgcatccagataaaggactttaggcgccttattaataaagtaatctgcaataacaaaacgaaaatatattgcatgagtccaattcttagtgctaggcaaactgcgcagtcgatcaccattaatcagatatattttaattctggttttatactgcaacgccagggcatcaaaatacttacgatcatcatcaccaaaataatcagtaaaaatatggaaacacaatcgacttccttcattatattttaatatactagcaatgctaattccgcaaccaaatagaaagtttttgtcagttccataagcgatgtccagacaaagattttctgtttctactttatgatcataatcaataacactattaagaaactcagtttcctggaaaaacacctgctgcattatttcctccgggaaatagcagaaataattaccttatgtaatctatcgtaatacttgctttggtaaaattcatcgatgctcgcaggaattttttcatgttcgatatgaatttcacctgctatatatttatttagaagagttacaaaaccagcaatatctcccggttgatacagatggccattgacatcaggttgaataatgtcagcaggcccggagacacaatcggcactgatacaaggaatcccccagctcaaggcttcaagtagggtcattgggaaaccttcaaaagaactcgtgagcaataacgcactcactttttcaatatcttgctggaccaattcccagggatattgttgccaaccataccagacaattcgatcatcaatatttaattctctaccataagcctggcatttttcgaaatcggagccatcacccaatacatggagtttccagttacctttcgcttgacttaagccatcaagcaggtctttaactcttttctggccttcaaatttcatacgcccaacataaataaacgttgccgtttcaccttcctcgggcgcgggaatgacactgtctttagtttcgacgggattaaaaataacatttatcgtgctttctgctacacctcgattaatcatttgctgtttaatgccagagctgattgctaaatgatagtcggcacaggtgatatattcagcatgttttttgtgatctaaagaaaaatgtggccaactaaatactggcatatcaattccactttttttacgtgcttttgcggcaaacaggcaggagatcacatcaatacaaataacgatatctggttggtactcctgaagccatttacttagagcatgaatatgtttcgcccgacgcaaaaaacctaaacgaatattggaaaaactacaactgtatttaataccttccagccatcccttatccattttgtcattacgacaaaagaaaaacatttcactttggatatgttgttgcctgaaggtagtaataacatcacggatgacagtttccatgccgccaaatccagaaacagcttcgccgataaacgctattttcatagaaactctcattaattgagtaaaactcactgttttaacggttttatttgtctataaaatcagaaacaatcgtactcatcattttatctggactgaatttatataaactatcataatccattggtttaacagaactgttaataaaatactctaacttatcccaatcatcatgacctattataaaaaagcgagattcactatagatttcactaccaaatacatttatattattagtaattaattttttattgaaaaatagtgcctcaagtatacgaagagtccagccagattggttttctttggttatatcaacaattatattagcatttaatgttcttctaatattctcttcataagatatttgtttttcaatcaaatacttactagtcgtagaacttgtcttatctttgacaacattaaaatctagcttacatcctagtgttgttaatctctcggctaactcattaattatttgaagacgccctttatcacgaccaaggaaaaaacatattggctggctgttatttttgtcagataaactataatttctaatttcatccattcctataggaaaaaattgttctattgccttgatcttttcattccctataaatctatgctcaaaatcatatataatatcgaaataattcgcgttatcaagaataaaatcttcgccaacagtatttcttagaagcaaaactttatgacagttaatattttttaatatttgtttattgatacctttattaacaacactgtcattaatgataattatgtcatcttttttaatatcattgaggtaatgcttgatgaataatcgccccagccatgcattatccatccctattttacttatttttttattaatccagttatatttttttggtgttgttatattttttatcttgtacttttttttcaggtactgaatcatttttaattcataatctgcaacccaatttataaaataaatagtcataataaagttagttccagtacatactaataaatatttttataatcctttgcgttgtgttcgctctttaatacgctcggccttaacgcttgccatgttcaataaattctgttcaagagacaatattttgcgtaaaggcatcccaaaataaaccttcataaatcgccagatatctctttgcgtcaggccaatattcatactactgaaatataaaccaatcaggtctttatcgcgccagcggcgcggtacttttgcacgtatctgtgcccgatgcagatcgataacactaatttttaattcatcttcccggccagtaaatggcaaatgaagcaaaaagtggcaaatgtaacagtcgcggtgatttatccctgcagtatgcattttacgcaccatagttgctacacgtgcgatcagcatacgcttaacacgtatatcaggcgggttgactgcccaatcggcacaataatcttcaaggctaattgtgggagtgagatcttcggtaataataaaacttgcgcgagttaatggatttaaccctttttcgccaaacccaatgcccttcattgtatcaacgccaacatcactcaggcgatgaatagcgtgccactctctgtctgcgcccaaaacgggcatccgcaaactgagtagattttttataatctcttttaatgtcgtccccttgtgccatttaagaaaatagcttttcccggacagttcaaagcgtaatgtacgacgagtctccagttcacgaaagacctcgccgttcagttttttgacctctgcaaaagcatctttaccacgccaaagtgtggcaagcggctcttttaattcaaccatctaaaccacctgtaatgatatccgcggctttttctggcaagctatacaaatcctgagtatcggcataatggcgagcattctccgcccaggccattcgcaatgggctctgagttaacgctttacgtaaaacttcatttaattgttcctgagagaaaggttcagcgatgaccgttccacaattggcatccgcaatataatgcgcgtacccacataccgctgttgttaaaacaggtaacccagcagtgatcgcttctagaagaacgatacccgcggcttcctgataagcgggatgcagtaataaatcagcggctgccattaattcactcacatcattgcgaccgaagaagaaatgcacattgctccgcacgccgagtttttctgccagcgcttcaaattttcgcggcttatcctgaccaacaacaaataaaagcgtattgtgacgtaaactttccggtaagcttgccaaagcttcaatactgcgatctacacctttacggccaaaatcacttccaacctgcagtaataagttttgttgctcttttatgccatttttctggcgataaatttcacggctgtttgggatttgctcactgtattttctgtccggataaataccgggaggaagaatttgaaaacgttcaggttcagtttgataatgcttctggaaatcggcgatttgcttatcggtcagcatcataagtttcgtgcttttaccctgctcgaaagtcgctcgctcaaatgcggcataatggcgatatcgacttgttaaacgatataaaaaacctttttcttgcgcaactttctcggcgtaacaaacatcagcggcaaaataaacatccaggccaggcatcttattaaacccaacaacgcgatctgcgggatgctctttgagatgattttgtacccaggcataatattctgcattgcgtccatggttggtatgggacttaactggcacctgaataagctcaaatgctttcgggcaatcgccttcccagctctgtgtatatacccgaacatggtggccccgtgcggcaactgtacttgcaatgcgcataaagtcacgttgaagcccaccaaatggaaaatatttatataaacaaaacgccacgatcataattgtgcattcctgtcagcactaggggcatcttctggcaacagcttttccgtagcggcgatcacatcctccgctgggataacagaaagatattttttgttgcggtcaagttcatgccgggtcggcattttctgataattccccgcccagaattgaataatattctcggtccagggacgccagaatacgtgatccgttgcaccaaatagactaatgactggcgttttcactgccgctgcaatatgtcccggcgcagaatccacaccaataaaaagcactgcatgatcaattaatgcacccagttcaggaaaacgtgttttacctgcaaggccagtaatgggttttgtttcgcaacctcgtgcaatctcatctacacaagcgagatcatctgcgctgggcccacaggttagcacaacctgatagcctcgctgttgcagcgcatcgataaccttagaaaatttatcgttatcccaacacttaaatatctgacgcgctgtcggttggatgacaacataatgatcttttacgcccagggcatctaattcccggcgcatcttcttccagcaatcttcggcgtaactcattgttgtgtcggtgtagaaatcggtaatacctaatggctcaaggacgcttaaattacgctcaacaatatgtgtaccgtgtattggcgctaagtgtgtgaagctttttttccaaataccatgctgccgatgaccataaagttggcttattttcatccgtgcaggtaaacaacgtaccagcagcgccaccatccactgatccgtaagattaatgaccaggtcataattattcgcacgcagagtttttatcaagctaagcacatttttaattttatcgaaagttcccgcacctttattgcttatcccatagagcgcattaatttccgggttttcagacaaaatagggatggtgtcctgataaagcagcatatcgatttttgcatcaggataattctgcttgagcgtactgatgacaggagtagttaataacatatccccatgatatcgcatctttatgaccaggatttttcgaaatggcttttccactagcgactcttttgtgtgattgtctggttaagttaagcagaaaaaagcacgctaccgccccaggctcaacagctacctgaatactgataacgcacttactttgacgtgctagtgtatcatttctttcgcagcaatccgacccgaatgatttttatacacaaaatatactttaatcataaaaatcaaatagataaaaaatagcatttcgataatgtcagtacggcctatgtagatttgaaaatggggccgagtttcaatgaatcgcataaaaatacaaaaaaaatgaagatgtagcggcagatcagaccaaactgaagctatttaagtcaaaaacgggaaaagtaatggtaaagccacagctaaatacatagaatccccagcacatccataagtcagctatttactatgctcgaattgctttacaccgcccttctctaccttattcagccgctgatctggatacggctctgggtgcgcggacgtaaggctccggcctatcgaaaacgctggggtgaacgttacggtttttaccgccatccgctaaaaccaggcggcattatgctgcactccgtctccgtcggtgaaactctggcggcaatcccgttggtgcgcgcgctgcgtcatcgttatcctgatttaccgattaccgtaacaaccatgacgccaaccggtagcgagcgcgtacaaagcgctttcgggaaggatgttcagcacgtttatctgccgtatgatctgcccgatgcactcaaccgtttcctgaataaagtcgaccctaaactggtgttgattatggaaaccgaactatggcctaacctgattgcggcgctacataaacgtaaaattccgctggtgatcgctaacgcgcgactctctgcccgcagcgccgcaggttatgccaaactgggtaaattcgtccgtcgcttgctgcgtcgtattacgctgattgctgcgcaaaatgaagaagatggtgcacgttttgtggcgctgggcgcaaaaaataatcaggtgaccgttaccggtagcctgaaattcgatatttctgtaacgccgcagttggctgctaaagccgtgacgctgcgccgccagtgggcaccacaccgcccggtatggattgccaccagcactcacgaaggcgaagagagtgtggtgatcgccgcacatcaggcattgttacagcaattcccgaatttattgctcatcctggtaccccgtcatccggaacgcttcccggatgcgattaaccttgtccgccaggctggactaagctatatcacacgctctagtggggaagtcccctccaccagcacgcaggttgtggttggcgatacgatgggcgagttgatgttactgtatggcattgccgatctcgcctttgttggcggtagtctggttgaacgtggtgggcataatccgctggaagctgccgcacacgctattccggtattgatggggccgcatacttttaactttaaagacatttgcgcgcggctggagcaggcaagcgggctgattaccgttaccgatgccactacgcttgcaaaagaggtttcctctttactcaccgacgccgattaccgtagtttctatggccgtcatgccgttgaagtactgtatcaaaaccagggcgcgctacagcgtctgcttcaactgctggaaccttacctgccaccgaaaacgcattgaggttgttatgcaaaaacgggcgatttatccgggtactttcgatcccattaccaatggtcatatcgatatcgtgacgcgcgccacgcagatgttcgatcacgttattctggcgattgccgccagccccagtaaaaaaccgatgtttaccctggaagagcgtgtggcactggcacagcaggcaaccgcgcatctggggaacgtggaagtggtcgggtttagtgatttaatggcgaacttcgcccgtaatcaacacgctacggtgctgattcgtggcctgcgtgcggtggcagattttgaatatgaaatgcagctggcgcatatgaatcgccacttaatgccggaactggaaagtgtgtttctgatgccgagcaaagagtggagctttatctctagtagcttggtgaaagaggtggcgcgccatcagggcgatgtcacccatttcctgccggagaatgtccatcaggcgctgatggcgaagttagcgtaacgtttatgccggatggtatgccatccggcgcgcatgaattacttctggcactgccgacaataaaacgttgcccgctgcgcatgtttagtcgccacaatcggcgtaccgcacacccgacacggctcaccttttcgcccgtaaacctgcaattcctgagcgaaatagcccggtttaccatcactttgcagaaaatctttcagcgttgtaccaccctgctcaatgctacgcagcaacaccgctttaatcacccgagctaacaattcacactctgccaggctcagactactcgccagccgatccggatggatccccgccgcaaacagactttcgctggcatagatattccctacccctaccaccagcttgttatccatcagccacggtttaatcgccgtttttttcttcgcgcacttctgatgcagatactcaccattgaaatcgtcgctaagcggctccggtccaagatgggtcagcacattatgcccttccagctctttggtccacagccaggcaccaaagcggcgcggatcggtgtagcgcagcactttgccgttgctcatcaccaaatccacatggtcatgcttttcagggggaagttcttctggaaggatgcgcaggctgccagacatccctaaatgaatgataatccagccctcaggcagctccagcagcagatatttagcccgccgctgcacgctaagcactggttggtcgcttaaacggtagatctcttcactaaccggccagcgcaagcgtccgttgcgcaccactgcatgaagaatggttgcaccaacgagatgcggttctatgccgcggcggctggtttcaacttcgggtaattcaggcatagcatctccaggaatgaacagatgcagtcaatatgggggcaagcagataacaaaaaaccccgccggagcgaggttttttgttacatcaaagcgagaattatttgattttcgcttctttgtagatcacgtgctggcgaacaactggatcgaattttttcagttccagtttttccggcttagtacgtttgttcttcgtagtggtatagaagtgaccagtaccagcagaagaaaccagcttgattttctcacgaatacctttagccatgatttatttcctctaagtacttagtacttttcgccacgggcacgcagttcagccagaactgtatcgatgccttttttatcgattacacgcatacctttagcagatacgcgcagggtgacaaaacgcttctcgctctcaacccagaaacggtgagagtgcaggttcggcaggaaacggcgtttagtcgcgttcagtgcgtgggaacggttgttaccggtcaccggacgcttgccagtaacttggcagactcgggacatgtctattctccaaaaatcaaattagctcgagcttcgtatggggtattggcgcctcgtcaggctttacagcccggtcatcgcagttctatgtgaactctcgattgccaggcccaaatgccaaacccgagattctcaaaggtggcgtagtatacgctgactcagcgatgtgctcaagtcccgaacagacaaagatcccgaaggatcgcgcatagcgggttaaatccagccgcgttcggcaaaagaaacatactctccacgcccaatcacgatatggtcgagcacgcgtaaatccatgaactgacaactctttattatccgttcagtaatgagtttatccgctttactgggttcagcacaaccgctagggtgattatgtgcaaggatcagcgcgctggcgtttatttttatcgcttcgcggataatttcccgaggatggacttcaacatggtttagcgtgccggaaaaaagacgcctatgcgttataacccggtgttgggagtcgagaaagatcaccataaagatctcccgctcctcacccgtgagctggctttgtaaaaattccctcgtcatctccgggctgagtaaagggctttcttcacgcatccgcacgttgtagtaacgccgcgccagttcagcaatcccctttaactgggcaaatttcgccacgccaattccatgaacgccactaaattgttcatattcagaggttaacaagccataaagagagccgaaattctccagcatctcttttgccagggttaatacatctttaccgcgcgttccggtacgcagaaatagcgccagcagctcgacatccgttaaggcgctaataccaaacttcagcattttttcgcgcggcatcaacagctgactattgtttttcaccttcacctcctttgtggtgctcgcatcctgtcatagccgtttcgttaaatcgacggccagttttcaatcctggaaagcgcctcgcaaagtgaatctcaggtgaaggcacgacaacaaaagtattgtgataaaatcgccaacttctggtgtcaccctacaggaaaaatcatcatgagcctggccggtaaaaaaatcgttctcggcgttagcggcggtattgctgcctataaaacccctgaactggtgcgtcgtttgcgcgatcgcggggccgacgtccgcgtagccatgaccgaagcggcaaaagcctttatcaccccacttagcttgcaggcggtttctggttatcccgtttccgacagtctgctggacccggcagccgaagccgctatgggccatattgagctgggtaaatgggctgatttagtgattctcgcccctgccacggcagatttgattgcccgtgttgctgccggaatggcgaatgacctggtaagcacgatttgtctggctacacctgcgcctgtagccgtgctccccgccatgaaccagcagatgtaccgtgccgctgccacgcagcataatttagaggtgcttgcttcccgtggtttgctcatctgggggccagacagtggcagtcaggcttgtggtgatatcggtcctgggcgaatgctcgatccgttaaccattgtggatatggcggtagcgcattttagccccgtcaacgacctgaaacatctgaacattatgattaccgccggcccgacgcgtgaaccgctcgatccggtgcgttatatctctaatcacagctccggcaagatgggttttgctatcgccgccgccgctgcccgtcgtggcgcgaacgtcacgctggtaagtggtccggttagtctaccgacgccaccgtttgttaaacgtgttgatgtgatgaccgcgctggaaatggaagccgccgtgaatgcttctgtacagcagcaaaatatttttatcggctgcgccgccgtggcggattatcgcgcagctaccgtggccccagagaaaatcaaaaagcaggccacgcagggtgatgaattaacaataaaaatggttaaaaaccccgatatcgtcgcaggcgttgccgcactaaaagaccatcgaccctacgtcgttggatttgccgccgaaacaaataatgtggaagaatacgcccggcaaaaacgtatccgtaaaaaccttgatctgatctgcgcgaacgatgtttcccagccaactcaaggatttaacagcgacaacaacgcattacaccttttctggcaggacggagataaagtcttaccgcttgagcgcaaagagctccttggccaattattactcgacgagatcgtgacccgttatgatgaaaaaaatcgacgttaagattctggacccgcgcgttgggaaggaatttccgctcccgacttatgccacctctggctctgccggacttgacctgcgtgcctgtctcaacgacgccgtagaactggctccgggtgacactacgctggttccgaccgggctggcgattcatattgccgatcctagtctggcggcaatgatgctgccgcgctccggattgggacataagcacggtatcgtgcttggtaacctggtaggattgatcgattctgactatcagggccagttgatgatttccgtgtggaaccgtggtcaggacagcttcaccattcaacctggcgaacgcatcgcccagatgatttttgttccggtagtacaggctgaatttaatctggtggaagatttcgacgccaccgaccgcggtgaaggcggctttggtcactctggtcgtcagtaacacatacgcatccgaataacgtcataacatagccgcaaacatttcgtttgcggtcatagcgtgggtgccgcctggcaagtgcttattttcaggggtattttgtaacatggcagaaaaacaaactgcgaaaaggaaccgtcgcgaggaaatacttcagtctctggcgctgatgctggaatccagcgatggaagccaacgtatcacgacggcaaaactggccgcctctgtcggcgtttccgaagcggcactgtatcgccacttccccagtaagacccgcatgttcgatagcctgattgagtttatcgaagatagcctgattactcgcatcaacctgattctgaaagatgagaaagacaccacagcgcgcctgcgtctgattgtgttgctgcttctcggttttggtgagcgtaatcctggcctgacccgcatcctcactggtcatgcgctaatgtttgaacaggatcgcctgcaagggcgcatcaaccagctgttcgagcgtattgaagcgcagctgcgccaggtattgcgtgaaaagagaatgcgtgagggtgaaggttacaccaccgatgaaaccctgctggcaagccagatcctggccttctgtgaaggtatgctgagtcgttttgtccgcagcgaatttaaataccgcccgacggatgattttgacgcccgctggccgctaattgcggcacagttgcagtaatatgacgccggatgacttttcatccggcgagtttctttaaacgccaaactcttcgcgataggccttaaccgccgccagatgttccgccatttccggcttctcttccaggtaagcaatcaggtctttcagggtgatgatagagatcactttgcagttgtaatcacgctcaacttcctgaatcgcgctaatctcgccgcgcccgcgttcctgacgatcgaggctaatcaacacgccagcaagcgtcgcgccattggcctgaataatctccatgctctcgcgaatcgccgttccggcggtgatcacatcatctaccagcattacgcgtccttgtaacgcgctaccaaccagattgccgccttcaccgtggtcttttgcttctttgcggttaaagcagtacggcaggtccaggtcgtgatgctccgccagtgccacagcggttgtggtggcaatcgggatccctttgtaagcagggccaaacagcagatcgaactcaatgccggaatccaccaacgcttcagcgtaaaaacggcctaacagtgccagatcgcgcccggtattaaacagcccggcgttgaagaaataggggcttttgcgcccggatttcagcgtaaactcgccaaactttaacacctgcttgctaagcgcaaattcaataaactggcgctgatatggtttcatgccttcgctcctcatcttacttttctacagacaaaaaaaaggcgactcatcagtcgccttaaaaatcagtttgccagcgccgccttctgcgtcgttacaatggattgctttcccctcgggccagagccaacaagatgagtagctcttcatgggtgaacggctcgccttctgccgtcccctgcacttcaatgatgcgcccgtcttcggtcatcactacgttcatgtcggtctctgcggcagagtcttcaacgtattccagatcgcaaaccgcttcgccgttcacaattccgacagaaactgcggctaccatccctttcatcggattggttttcagcttgccgttttccaccagcttctgtagcgcatctaccagcgccacgcaggcacccgtaatgctcgcggtacgcgtgccaccatcagcctgaagcacgtcgcagtccagcgtaatggtgaactcacccagcgctttcaaatctactgccgcgcgaagagcacgggcgatcagacgctggatttccattgtgcgtccaccctgcttacctttcgccgcttcacgagcgttacgggtgtgggtagaacgtggcagcatgccgtactctgcggtgatccagccctggccctgacctttcaggaagcgcggcacgccttcttcaatagaggcggtacacaacactttggtatcgccaaattcgaccagcacgctgccttctgcatgttttgtatagttacgagtcagggtaacgggacgcacctgattattgctacggcctgctggacgcatattgaaatctccggcttgaaacaaatgtggctgcgcattatacggacttccggcggttattcctatcctgacaaggcatcgatggctataatccttccacctctccttttataaacaggaacgtctatgatccgcagtatgaccgcctacgcccggcgtgaaatcaagggtgaatgggggagcgcaacctgggaaatgcgcagcgtaaaccagcgttatctggaaacttactttcgtctgccggagcagttccgtagccttgaacctgtcgttcgcgagcgtattcgttctcgcctgacgcgcggtaaagtggaatgtaccctgcgctatgagccagatgttagcgcgcaaggtgagctgatcctcaacgaaaaactggctaaacagctggtaactgccgcgaactgggtaaaaatgcagagtgacgaaggggaaatcaacccggttgatattctacgctggccgggcgtgatggcagcccaggagcaggatcttgacgccattgccgctgaaattctcgcggcgctggatggtacgctggacgactttattgtcgcgcgcgaaaccgaaggtcaggcactgaaagcattgatcgagcagcgtctggaaggcgtcaccgccgaagtggtcaaagtccgctcccatatgccggaaatcctgcaatggcagcgtgagcgtctggtcgcgaagctggaagatgctcaggtgcaactggaaaacaaccgtctggagcaggaactggttctgctggcacaacgaattgacgttgccgaagaactggatcgcctcgaagcgcatgtcaaagagacctacaacattctgaagaaaaaagaagcggttggtcgtcgtctggattttatgatgcaggagttcaaccgcgagagcaacactcttgcgagcaagtctatcaatgccgaagtgacaaactccgccatcgagctgaaagtgttgattgagcagatgcgcgagcagattcagaacatcgaataactcgtaacgccaattcttacttttccgccttcacaaatgccgccactcaaacagagcggcatttttcttccccgcaacattcaattctgttttgcgtgcctgctccagattttgcgatgtttttttgcccagcacactgagaacgtgagatactcacaactgtatataaatacagttacagatttactttctttgcaattgatatcacatggagtgggcaatgaacgaacatcatcaaccttttgaagagataaaactgattaatgcaaacggagcagaacaatggagtgcaagacaacttgggaaactactgggttatagtgagtatcgtcactttatacctgtattaacgcgcgccaaagaagcctgtgagaacagtggtcacacaattgatgaccatttcgaggagatcctcgatatggtcaaaattggcagtaatgccaaaagagcattaaaagacatcgtactctcccgctatgcctgttacctggtagtacaaaacggcgaccctgcgaaaccggtcattgcggcagggcagacttattttgctatccagacccgacggcaggagcttgctgacgatgaagcatttaagcaacttcgtgaagacgaaaagcgtctgtttctgagaaatgagttgaaagaacataacaaacaattggttgaggcagcacagcaagctggggtagcgacagctactgatttcgccatatttcagaatcatggttaccaggggctgtatggtggattagatcagaaagctattcatcagcggaaggggctgaaaaagaatcagaagatcctggatcatatgggtagtacagaactggcggctaatctctttcgagctacccaaacagaagaaaaactcaagcgggatggcgtgaatagtaaacagcaagcaaacaccacacactttgacgtgggtcgcaaggtgaggcaaaccattcaggaacttggcggaaccatgcctgaggagttgccgaccccgcaggtcagcatcaagcagttggaaaacagtgtaaaaattacagagaagaaataacagaaactaaaaactctttttgttgattgagacacccgatgcgtaagccaaggtccaggtgcagtgaacacaatggctaaatattgcacctttcttttccccctcagttttaacctattttttcttatgcattttctcagacaagaagtcagaagaatgcatctctgctacagaaaatagcgatttcacataactacaagttatcaatttcccctccccttaaaaaatctcaatcgtgacaatgcgcacaaatcgctaccctgccagacagatttttagggagagaaccatgctgttacacattttgtatttggttggcattactgccgaagccatgacgggggcgctggcggccggacgacggcgcatggatacatttggcgtaattattattgcgaccgccaccgcaattggcggagggagtgtgcgcgatattctgctgggccactatccgctcggctgggtcaaacacccggaatatgtgattatcgtcgctaccgccgcagtactcaccactatcgttgctcctgtaatgccttacctgcgcaaagtgtttctggtgctcgatgcgctcggactggtggtcttttctatcatcggggcacaggttgcactggatatggggcacggcccaattattgccgttgtcgcggcggtaaccaccggcgtgtttggcggcgttttgcgcgatatgttctgtaaacgtatcccactggtattccagaaagagttgtatgccggtgtcagttttgcctccgccgtgctgtacatcgcgctgcaacactatgtttctaaccatgatgtggtaattatctccaccctggtattcggcttttttgcccgcttactggcgctacgccttaagctgggattaccggtcttttactacagccacgaaggacattaaggttcaaaacctgtgatctgctgggcagccagccaactgcccagcttcttgatttgcgcattttccttccattcaataacctgtctggcgcgtccgcttccagtccccggcagctgctgccagaactgctccgtgctaaataaaagttggctccaggaccgttcatcactggcattaagcgccgcccgggttagcggtattcccattgccatcacccagcgagtaaaaggctgcttacgagccagattaaactgatgccatagctgcgcacttttacttttcgcgatccccggcgtgttctgtaattgctctggcgttaataaaagccaggaaaagatatgttcaaagcgatgagtctgatgcagcgcgcgccaaccggcctcaccaatgccatccagcccaagaacctgttttgcccccagccagactaagcgactaatgaactgttcctgacaaacatcagaagcaaagtagcaggtcaagctgttaaagcggttttctggcggtgtcggttttgtacgttctgcaccgcgccacaccacatcatcaatgcgaggaataccctgaccggcaaggctgacgagaatctgatcaccaggcgcaatatcccactcctgccagcgcctgacggaaccaatattcacccgctggacttttttatcatccagcatgacaggtgcgagactcgcaaccacgcttattttaccgctcttacccaccgcaaactgaattgccttcacttcggcaacctgagctacaggttgatatttccaggccaccagccactctgcctggcccggtagccaatggcgggattctggctctttcgccgctcgtacaactacgccatcggtgacgaagggtaattccgctttccaccactcattgcgtacgcgcgcaacttcatcagcatttttcaccgcacgggtatacgtctgcgttagagtaaaacctgcggtagccagctcttttaaacgatcagacattaactgcggtccatccggccatgcccagacaaaaacgcccagagaattcagcgtgtcgctatcgtcctggcgcatcatcaagccagcaacttttgcgcgggcatttattccccccatttgttgttggatatgcccctcgcgctggagaaatatttccccctgaagcgtactgttggctaaaggcccgctaacggtttgcggcacagcggaaattaagctaactttctgcgtccagtcctcgcctttcaggccattaccgcgactgattgctttgttcagtttcccgtcccgataaaccagggttaccgcaacgccatcaacttttggctgcacccaaagatcgctacgttctcgcatccacagacttaatgcgtttttatccaccattttgcgtacacccgtatgggcaaccggatgcataaccgcaccatttaaaggcggcatcatcacgtcgcggggctcgctcccaaagcagcgttgccactgcgtaagacgggcgcttaactgatcgtaaacaccgtcttccacctcactttttccttccttccagtagtcatcgtcccactgttttatttgctgttgcaggcgggaaatttcttcctgtgctctggctgggctccaggccggacagaccgcccacacagaactttgccagcacaagatacctattaatatcgccatccatactttcatcatcacctccgctgtagatagtcaggcagatatacaacgtgatgaaagcaaagccgagtggcaaaaacggagtctgcgaggacgcttcctgaaaatcgtctttattgcagtgaatgacaggcaaatgcggaagcagctacgcaaaacgcaacaactttgcgcaaaaagtgtgagcaagggctacgtcacatggccgcgccgtgtataataagctcgtatgtaggctttatttcgctaatcacatacgaaagatactcatggctcaaggcacgctttatattgtttccgcccccagtggcgcgggtaaatccagcctgattcaggctttattaaaaacccaaccgttgtgtgacacccaggtttctgttagtcacaccacacgccaaccgcgtcctggtgaagtccacggtgaacattatttctttgttaatcatgatgaatttaaagaaatgattagcagagatgcgttcctcgaacacgcagaagtttttggtaattactatggcactagccgtgaggccattgagcaagtactggcgaccggtgtcgatgtttttctcgatatcgactggcagggcgcgcagcaaattcgccagaagatgccgcacgcgcggagtatctttattttaccgccgtccaaaattgaactggaccgccgtctacgcggtcgcggtcaggacagcgaagaggtcattgcaaagcgtatggcgcaagctgttgcagaaatgagccattacgccgaatatgattatctgattgtgaatgatgacttcgataccgcgttgaccgatttgaagaccattattcgcgccgaacgtctgcgcatgagccgccaaaagcagcgtcatgacgctttaatcagcaaattgttggcagactgaacctgatttcagtatcatgcccagtcatttcttcacctgtggagctttttaagtatggcacgcgtaactgttcaggacgctgtagagaaaattggtaaccgttttgacctggtactggtcgccgcgcgtcgcgctcgtcagatgcaggtaggcggaaaggatccgctggtaccggaagaaaacgataaaaccactgtaatcgcgctgcgcgaaatcgaagaaggtctgatcaacaaccagatcctcgacgttcgcgaacgccaggaacagcaagagcaggaagccgctgaattacaagccgttaccgctattgctgaaggtcgtcgttaatcacaaagcgggtcgcccttgtatctgtttgaaagcctgaatcaactgattcaaacctacctgccggaagaccaaatcaagcgtctgcggcaggcgtatctcgttgcacgtgatgctcacgaggggcaaacacgtagtagcggtgaaccctatatcacgcacccggtagcggttgcctgcattctggccgagatgaaactcgactatgaaacgctgatggcggcgctgctgcatgacgtgattgaagatactcccgccacctaccaggatatggaacagctttttggtaaaagcgtcgccgagctggtagagggggtgagcaaacttgataaactcaagttccgcgataagaaagaggcgcaggccgaaaactttcgcaagatgattatggcgatggtgcaggatatccgcgtcatcctcatcaaacttgccgaccgtacccacaacatgcgcacgctgggcagtcttcgcccggacaaacgtcgccgcatcgcccgtgaaactctcgaaatttatagcccgctggcgcaccgtttaggtatccaccacattaaaaccgaactcgaagagctgggttttgaggcgctgtatcccaaccgttatcgcgtaatcaaagaagtggtgaaagccgcgcgcggcaaccgtaaagagatgatccagaagattctttctgaaatcgaagggcgtttgcaggaagcgggaataccgtgccgcgtcagtggtcgcgagaagcatctttatagcatttactgcaaaatggtgctcaaagagcagcgttttcacagcatcatggacatctacgctttccgcgtgatcgtcaatgattctgacacctgttatcgcgtgctgggccagatgcacagcctgtacaagccgcgtccgggccgcgtgaaagactatatcgccattccaaaagcgaacggctatcagtctttgcacaccagcatgatcggcccgcacggtgtgccggttgaggtccagatccgtaccgaagatatggaccagatggcggagatgggtgttgccgcgcactgggcttataaagagcacggcgaaaccagtactaccgcacaaatccgcgcccagcgctggatgcaaagcctgctggagctgcaacagagcgccggtagtagctttgaatttatcgagagcgttaaatccgatctcttcccggatgagatttacgttttcacaccggaagggcgcattgtcgagctgcctgccggtgcaacgcccgtcgacttcgcttatgcagtgcataccgatatcggtcatgcctgcgtgggcgcacgcgttgaccgccagccttacccgctgagccagccgcttaccagcggtcaaaccgttgaaatcattaccgctccgggcgctcgcccgaatgccgcttggctgaactttgtcgttagcagcaaagcgcgcgccaaaattcgtcagttgctgaaaaacctcaagcgtgatgattctgtaagcctgggccgtcgtctgctcaaccatgctttgggtggtagccgtaagctgaatgaaatcccgcaggaaaatattcagcgcgagctggatcgcatgaagctggcaacgcttgacgatctgctggcagaaatcggacttggtaacgcaatgagcgtggtggtcgcgaaaaatctgcaacatggggacgcctccattccaccggcaacccaaagccacggacatctgcccattaaaggtgccgatggcgtgctgatcacctttgcgaaatgctgccgccctattcctggcgacccgattatcgcccacgtcagccccggtaaaggtctggtgatccaccatgaatcctgccgtaatatccgtggctaccagaaagagccagagaagtttatggctgtggaatgggataaagagacggcgcaggagttcatcaccgaaatcaaggtggagatgttcaatcatcagggtgcgctggcaaacctgacggcggcaattaacaccacgactagcaatattcaaagtttgaatacggaagagaaagatggtcgcgtctacagcgcctttattcgtctgaccgctcgtgaccgtgtgcatctggcgaatatcatgcgcaaaatccgcgtgatgccagacgtgattaaagtcacccgaaaccgaaattaatgttttatgaacccaacacgttatgcacgcatctgcgaaatgctcgccaggcggcagcctgatctgaccgtctgcatggagcaggtccacaaacctcataacgtttctgcgattattcgtaccgcagatgccgttggcgtacatgaagttcacgccgtctggcctggtagccgcatgcgcaccatggctagcgcagcggcgggtagtaacagctgggtacaggtgaaaacacaccgcaccattggcgatgccgtcgctcatctcaaaggccagggcatgcagattctggcaacccatctttctgataacgctgtcgatttccgcgaaattgattacactcgcccgacctgcattttgatgggacaggagaaaacgggcatcacgcaggaagcattggccctggcggatcaggacatcatcattccgatgatcggcatggtgcagagcctgaatgtttccgttgccagtgccctcattctttacgaagcccagcgtcagcggcaaaatgcaggcatgtacctgcgtgaaaacagcatgttgccggaagcagagcaacaacgcctgttgtttgaaggcggctatccggtgctggcgaaagtcgcaaaacgcaaaggcctgccttatccccacgtcaatcagcaaggcgagatcgaagctgatgccgactggtgggctactatgcaggctgcagggtaagtgccatgaaaggtcgcctgttagatgctgtcccactcagttccctaacgggcgttggcgcagcacttagtaacaaactggcgaaaatcaacctgcataccgtgcaggatctactcttacaccttcccctgcgctacgaagatcgcacccatctctaccccatcggagaactactgccgggcgtttatgccacggtggaaggcgaagtgctgaactgcaatatctccttcggcggtcggcggatgatgacctgccagatcagcgacggttccggcatcctcaccatgcgctttttcaatttcagcgcggcaatgaaaaatagcctggcggcgggccgccgtgtactggcttatggcgaagcaaagcgcggtaaatatggtgcggagatgatccacccggaataccgcgtgcagggcgatctcagcacgccagaattacaggaaacgctcacgccggtttatccaacaacggaaggcgtaaagcaggccacgctgcgtaaattaaccgaccaggcgctggatctgctcgacacctgcgccattgaagaactcctgccgccggaactgagtcaaggaatgatgacgctaccggaagcgttgcgcactttgcaccgcccgccaccgacgctacagcttagcgatctggaaaccgggcagcatccggcgcaacgtcgtctgattctggaagaactgctggcgcacaacctcagcatgttagccttacgtgccggagcacagcgttttcatgcccagccgctgagcgccaatgacacgctgaaaaataaactcctcgccgccttaccgttcaagccaacgggcgcacaggcacgcgtagtggcggagatcgagcgcgatatggcgctggatgtgccgatgatgcgtctggtgcagggcgatgtaggttccggtaaaacgctggtcgccgccctcgccgcgttgcgtgcgattgcccacggcaaacaggtagcattgatggcaccaaccgaattactcgccgagcagcacgccaataacttccgcaactggtttgcaccgctcggtatcgaagtgggctggctcgccggtaagcagaaaggtaaagcacggctggcacagcaggaagccatcgccagcggtcaggtgcagatgattgtcggtacacacgccatcttccaggaacaggtgcagtttaacggcctggcgctggtgattatcgacgaacagcatcgttttggcgtgcatcagcgtctggcattgtgggagaaaggccagcagcagggcttccatccgcatcagttgatcatgaccgccacgccgatcccccgcacgctggcaatgactgcgtatgccgatctcgataccagcgtgatagatgagctgccgccaggccgcacgccagtgactacggtcgctattcctgatacccgccgtaccgacatcattgaccgcgtgcaccacgcctgcataactgaaggtcgtcaggcatactgggtttgtacgttgattgaagagagcgaattgctggaagcgcaggcggcggaagctacctgggaagagttgaaactggcgctaccagagttgaacgttggcctggtacacgggcggatgaaacctgccgagaaacaggcggtgatggcgagctttaaacaaggtgagctacacctgctggttgccacaaccgttattgaagtcggcgttgatgtgcctaacgccagtctgatgattatcgaaaacccggagcgtctgggtctggcgcagttacaccagctgcgcgggcgcgtaggtcgtggcgcggtggcttctcactgcgtgctgctctacaaaacgccgctttctaaaacggcgcaaattcgcctgcaagtgctgcgcgacagtaacgacggttttgtgattgcgcaaaaagatctggagattcgcggccctggcgaattgttaggcacgcgtcagacgggtaatgctgaatttaaagtggcggatttactgcgcgatcaggcgatgatcccggaagttcagcgcctggcacgccatattcacgaacgttacccacaacaggcaaaagccctgatagaacgctggatgccggagacggaacgttacagcaatgcgtaaaaggcggcagtgagaagaccgccatttcaggttaccctaccttcctgccggatgcgattcatcaccctacaaattcaataaattatgaatcaatacgcaggcttgataagcgaagcgtatcaggcatttgtctttgttgcggcggcacttctaccgccgcttcatcggttaaccggcaaaaatcggcaacatcaaatacaacttaattaccagcgcattgacgatatcgataaagaacgcaccgaccatcggcaccaccaaaaacgccatgtggcccgggccaaagcgttcagtgatcgcctgcatgttggcgattgccgttggcgttgcaccgaggccaaaaccacagtgacccgcagccagcactgccgcatcgtagtttttgcccatcatgcgccaggtaacgaagatggcatacaacgccatgaagatggtctgtaccaccagaatcgccagcatcggcagcgccaggctagccagctcccacagtttcagccccatcaacgccatcgccaggaacaagctcaagcttacgttacccagcacggataccgcacgctcaaagacgcggtaaaagcccattatactcagaccgttgctcagaatcacgccaacaaacagtacacagacgaaggtcggcagttcaaaagcagtgccagccaaaagttgcgcaacaattttccccaccgtcaggcagatagcaatcagcgcgatagtttcaatcagcaccaagctggtgatcatgcgtcccacatccggcttttcaaacgccgtcgggacttcctggtcatccggaataccgttcggcgtggtggagtgtttcaccagatagcgcgccaccggaccgccaatcaagccgcccagcaccagaccgaacgttgcacaggccatcgccacttccgtcgcattggtgaagccataacgttcaatgaacaatttactccacgcagcgcccgtaccgtgaccgccggaaagagtaatagaaccggccaacagccccatcagcggatcaagccctaacaagctagccataccaatgccaatggcattttgcatcaccaacagaccaacaaccacaatcaagaagatgccaaccacacgcccaccggcacgcaaactggcaatgttggcgttcaggccaatggtggcgaagaaagccagcattaacggatcgcgcagggacatatcaaagttgacttcccagcccatgctttttttcagtactagtagcgccagcgccaccaacaaaccacccgcaacaggttccggtatggtgtatttcttcaaaaaggagacggaatggaccaacttacgcccgagcagcaacgtcagcgttgcggcaacaagcgttgctaaagtatcgagatgaaacatagttactcctttgtatccgcatcactctttcatactcgtcatacttcatcgcgcagtggcaacttcatgaactatgacgggtatcgagttatgctttcctgggtcaaattctcagctgttaatgaacaaatggcatggattttaagcagaaaaataccaaaagttatataaaaaagtgcatttatctcatttaaatatttagatgaggatgtggcaaacgtttgcttttctctttcggtcagctaaaatgcccgctttgctaccacgggattgttttcgatgtctgtttccaccctcgagagtgaaaatgcgcaaccggttgcgcagactcaaaacagcgaactgatttaccgtcttgaagatcgtccgccgcttcctcaaaccctgtttgccgcctgtcagcatctgctggcgatgttcgttgcggtgatcacgccagcgctattaatctgccaggcgctgggtttaccggcacaagacacgcaacacattattagtatgagcctgtttgcctccggtgtggcaagcattattcaaattaaggcctggggtccggttggctccgggctgttgtctattcagggcaccagcttcaactttgttgccccgctgattatgggcggtaccgcgctgaaaaccggtggtgctgatgttcctaccatgatggcggctttgttcggcacgttgatgctggcaagttgcaccgagatggtgatctcccgcgttctgcatctggcgcgccgcattattacgccgctggtttctggcgttgtggtgatgattatcggcctgagcctaattcaggttgggttaacgtccattggcggcggttacgcagccatgagcgataacaccttcggcgcaccgaaaaatctgctgctggcaggcgtggtcttagccttaattatcctgcttaaccgtcaacgtaacccttacttacgcgtggccagtctggtaattgcgatggcggccggatatgcgctggcgtggtttatgggcatgttgccagaaagcaacgaacctatgacgcaagaactgattatggtgccaacgccgctctattacggtcttggcattgaatggagtctgctgctgccgctgatgctggtctttatgatcactagcctggaaaccattggcgatatcacggcgacctctgacgtttccgaacagccagtgtccggtccgctgtacatgaaacgcctgaaaggcggcgtgctggcaaacggcctgaacagctttgttagcgcggtgtttaacaccttcccgaactcctgcttcgggcaaaacaacggagtgatccagttgactggtgttgccagccgctatgtcggttttgtcgtcgcgctgatgttgatcgtgctgggtctgttcccggcagtgagcggttttgtacaacacattccagaaccggttctgggcggcgcaacgcttgtaatgtttggcaccatcgccgcctccggtgtgcgtatcgtttctcgtgagccgctgaaccgtcgggcgattctgattatcgcgctgagcctggcggttggtctgggcgtgtctcagcagccgctgattttgcagtttgcccctgaatggctgaaaaacctgctctcctccgggatcgccgcgggcggtattactgccatcgtgctgaatctgattttcccaccagaaaaacagtaattcactggcggcggtaagataattaccgccgcagtctcacctctttaaccattcccgccttgaggattgcgcgtaaatcgtgcataactcccttatgtgcatttcacgggatggaagaccatgaaatttattgggaagctgcttctctacattctcatcgctctgttagtggcgatcgctggcctctattttcttctgcaaacccgctggggagcagaacatatcagcgcatgggtttccgagaatagcgactatcatctggccttcggggcgatggatcaccgtttttccgcgccatctcatatcgtgctggagaacgtcacgtttggtcgtgatggccagcccgcgaccctggtggccaaaagtgtcgacattgcgctaagcagtcggcaactgaccgaaccacgccatgtcgataccatcctgctggaaaacgggacgctgaatctcaccgaccagaccgcgccgctaccgttcaaagccgatcgtctgcaactgcgtgatatggcgtttaatagcccgaatagcgaatggaaactgagcgcgcagcgggtaaatggcggcgtagttccgtggagtccaaaagccggtaaagtgctgggtacgaaggcgcagattcagtttagtgccggaagccttagcctcaatgatgttcctgccaccaatgtactgattgaaggcagtattgataacgatcgcgttacgctgactaacctgggtgccgacatcgcccgcgggacattaaccggaaacgcgcagcgtaacgccgacggcagctggcaagtggaaaacctgcgcatggcggatatacgtctacaaagcgaaaaaagcctaaccgacttctttgcgccattacgctctgtcccgagcttgcagattggtcgcctggaagtgatcgatgctcgtttgcaaggtccggactgggcggtgaccgacctcgatctcagcttgcgcaacatgaccttcagtaaagatgactggcagacacaggaaggcaaactgagcatgaacgctagcgagttcatttatggtagcctgcatttatttgacccgattataaacacggaattttccccgcagggcgtagcgctgcgccagttcaccagccgctgggaagggggtatggtcagaacgagtgggaactggctgcgtgacgggaaaacgttgatccttgatgatgcggcaattgccgggctggaatataccttgccgaaaaactggcaacagttgtggatggaaacgacacccggttggttaaacagcctgcaactgaagagatttagcgccagccgcaatctgatcattgatatcgaccctgacttcccgtggcagctcaccgcgctcgatggttacggtgccaacctgacgctggttaccgatcataaatggggcgtctggagtggcagcgcgaatctgaatgccgccgccgcgacattcaatcgtgttgatgttcgtcgcccgagcctggcgctgaccgccaacagcagcacggtgaatatcagcgaactgagtgcatttactgaaaaaggcattctggaagccaccgccagtgttagtcaaacgccacaacgtcagacacatatcagcctgaatggacgcggtgtgccggtgaatattttgcaacagtggggatggcctgaattaccgttgactggcgacggcaatattcagcttaccgccagtggcgatattcaggccaatgtcccgttgaaacctacggttagcgggcaattgcatgccgtgaacgccgcaaagcagcaagtgactcaaaccatgaatgctggcatcgtttccagcggtgaagttacaagcacggagccggtgcggtaaacatcaatctcgccgggtacgactcagacgtacccggcattccatcaatagattacaacgtaattgtcagcgcattcccttgaggcttcaccaccagcccctgctcactttcagcctggctaccgtcttgcagaccatttactttcacaacattgcgcaggcacagtgtccagttcttcgcctcgcccgcaccagtcacagtaatcgtgttgccagtacgtgctgcttttaaagtaaagatcacgcttccgtcagcagcgggcacttcacagacggcttcatgcccgtcttgcagattgaagaggtggaatgccgtgccttcgtgccacacgtaatcgggacgttgatcgttgttgcccagcgccagtagagtgttatcacgcacataaacgggcagactcaggaagccgtgctgctgtttatgccagcgactaccgtcgagttcatcgttgtgccacaggtgtgtccagcgaccttccggcaggtagaactgcacatcgcccgcttcagtgaacaccggcgcaaccatcacgttgtcgcctaacatgtattgacggtcaaggtaatcacaagccggatcgtccgggaactccatcatcatggcccgcatcatcggcgtaccccgcgcgttcgcacgcgcagcttcacgatacagatacggcatcatgcggcatttcagttgcgtgaagaagcgcaccacatcacaggactcatcatcgtaggcccacggcacacgataagatttgctaccgtgtaaacggctatggctggagagcaaaccaaacgcgcaccagcgtttgtaaacgtgcgccggagcggtattttcaaagccgccgatatcgtggctccagaagccaaaaccactaaggccaatagacaaaccaccgcgcaggctttccgccatactttcgtagttagcgtaacaatcgccaccccagtgtaccgggaatttctgcgcaccgacggaggcgctgcgggcaaacaagacagcttcttcctcaccaacggtgtccttgagcacgttccacaccagttcgttgtagatgtacgcataatggttatgcattttctgcggatcggaaccgtcaaaccactgaacatcagttgggatacgttcgccaaagtcggtcttaaagcaatcaacgcccatcgcgaccagacctttcagtttgtcggcgtaccatttgcaggcatccggattggtaaagtcataaatcgccagacctggctgccatttatcccactgccataggctaccgtccgggcgtttgagtaaatagcctttctcttgtaactctttaaagacgggggatttttgaccgatataggggttaatccagacgcagattttcagtcctttcgctttcaggcggcggatcatcccttccgggtcagggaaagtcagcgggtcccactcaaaatcgcaccactggaaggctttcatccagaaacagtcaaagtggaaaacatgcagcggcagattgcgttccgccataccatcgataaagctgtttaccgtcgcttcgtcgtagttggtggtaaaactagtggttagccacaggccgaaggaccacgcgggcggcagcgccggacgaccagtaaagcgggtataacgatcaagtaccgctttcggcgtcgggccgtcgataacaaagtattcgagatattcactctcaacgctgaactgcactttggagactttctcgcttcccacttcaaaagagacacactggggatgattgaccagtaccccataaccacggttagtcatgtagaacgggatatttttatacgcctgttcagtacttgtgccgccgtcccggttccaggtctctaccgtctggccattgcgcaccagggcagtaaagcgctctcccagaccgtaaactgtttcgccaacgccaagatcaagccgctcaaacatataattgcgttgattattcgtgtcctgcacgtagccattatttttcacctgactaccggtaatacgttcgccgttgcgcagaaaatccagactccagaactcacctttgctgacacgcgcgcttaagttgccacttttaaactcagcataacgttctgtgttttcgattgtgaccttcacgtcctgcaaaatattgagcggataatgaggaccgttattcagcgccccctgaaaatgctcaatccgcacaccgacaataccttcctgtggggagaaaaagcgcaacgtaaataaaggcgtatcaagctgccaggtacgttcacgcacatcacggggggcagcatagaccaccatttcattatcctgctgttcaacctcgaacacctgaagcgggtgaatcaaattgaggccaggttgaatcaaccagtttccatcgctaattttcattgccgttccttagttctgcacttcttgagaggtgaattgttgctggcaacggcgtttaccctgagccagctgttccataacggttttcagattgtgcgtcgtgagactgtagtagcgtttagcgataatcgcgctcagcaaataacagatcgccggaacaatcgtgaatagcgcaataatgatgctaatcgtggcgctgttctgcgctttttctgccgcatcatatccgccataagccagcatccagccgataagagcgccgccgaaggccaaccccagtttgagcacaaacagcgtgccagcaaaactgatcccggtcaggcgtttaccattgcaccactcgccgtagtcgacggtatcggacatcattacccactggataggtgtcaccagttgatgcaacacaccaatcacgaagatgaagacaaacatagtgatgctggcctgcatgggaacaaagaacatcgcgaggctaatcactgccagcagggcgttcgtccaccagaagatagtgactttacatttccagtcggtcagaggttttgccagtgcggaaccaatcaggttacccacgcaataagtggtgagaaaagcgacaaacacttccggcgtgcccaaaatccatgtgacgtaatacatcatcgccccaccgcgtacgcacaccgccaggatattgaaaatggttagtaaaccgacaatccgccactggtcgttttgccagatatcacgtaaatcttcccgcatagacgttgttgtaggtggtgcttcaacgcgttctttagtggtgaagaaacaaaatgccagcatcatgaatgccaccacggaaaggaccgcgataccgccctggaaaccgagtggtttattatcaccgccaattaaattaaccagtggcatcatcagaacagtagaaagcatgcctcccgcggtcgccagcacaaaacgccaggattgcaggctgatacgctgagtcgggtcattggtgattacaccacccaatgcgcagtaagggatattgacgacggtataaagtaaggtaagtagggtgtaagtaattgctgcatagatcattttgccgttcatactgagatctggcgtgctataggccagtacacagacgatcccgaatggcagtgcgccaaacagtacccacggacgaaatttaccccagcgagagcgcgttcgatcggccaacaaccccatgcaaggatcggaaatcgcatccagtgcacgagcgaccaaaaacatggttccgacaaaaccggcaggaatgccaaaaatatcggtataaaagaacatcatatataacattacgttatcgaaaataatgtggctggcggcgtctcccatgccataaccaattttctctttaacggacaacacttcactcttcatctgcttttccttgatgctataggggtgctgagaccgataacgcattttgtaaaccatccctgtgagagcgaatattccgatatctggttattaatttatgattcttgttttatgtgatcgtggtagcgttaattccgctcatatatcattgtaaaatatgggttttatatgaactataatgctttcgtgataatacgctgcgtgtattaggcggaaaaaactgatctgggggatgtagaaactcaaggaagtagctataatgcgccccgcctccatgtagcaatcgaggcgcggaagatcgtcgtctccggtgaggcggctggacttcaaatccagttggggccgccagcggtcccgggcaggttcgactcctgtgatcttccgccaaaatgcctctcctgacgttctccaaccccttgtaatactgtcaatccagatattttctactgctcaatattcaatcggcttcaggaatacctggtctaaggttttgtgatggacgatgagcggctgaagaatccgcctgtcggttcttctgtcctcgaacgcatccgcgatattcacgccagtatgcgccgtgtttatttgcaggtgatttgcccccctgctgactctcagccaactgtatcgccattaaggtgaagatgttgttttactcgccccagaacacccttttttatacgactattctatttctttaaccgctggcgaaaaaaactgactataaacttcaccaataatcagactgccatcaagattaatttgttcatttaatatatcaaatcaacttgttttatttttactatcaaaaatagctcattgccttactataattaatatataaattcggtaattaattcttaacatgcttttactaataatctcaattgctggccctataatattgcgctagcattgctttctggttgtatcagcgatactcaaaaattcttaatacaatactcattcgactggtacttatttgtaactcagttatattttttcgcccggtgattcagaagaatgcaaaaaacggctaccactccaagtaaaatacttgatctcactgccgcggcatttttacttgtcgcctttctgacgggtattgcgggcgctcttcagactcctaccctaagtatattcctcgcagatgaactgaaagcccgtcctataatggtaggttttttcttcaccggtagcgctattatgggaattctggtcagtcaatttctggcaaggcactccgataaacaaggcgaccgtaaattactgattctgctatgttgcttatttggagtgctggcctgcacgctttttgcgtggaatcgcaactacttcattctcctcagtacgggcgtacttctgagtagttttgcttccaccgcaaacccgcaaatgttcgccctcgcccgtgaacacgccgacagaacaggccgtgagacggtcatgttcagtacatttttacgtgctcagatcagccttgcctgggttatcgggccaccgctcgcttatgaactggcaatgggatttagttttaaagtgatgtatctcaccgctgccatcgcatttgttgtttgcggactgatagtctggttgtttttgccaagtatacaaagaaatattcctgtcgttacccaacccgtagaaattttaccctccacccacaggaagcgggatacgcggctactttttgtggtctgtagtatgatgtgggcggcgaataatctctacatgataaatatgccgctatttattattgatgaactgcatctaaccgataaactgactggagaaatgattggtatcgctgccggtctggaaattccgatgatgttaatcgcaggctattacatgaaacgtattggcaagcgactattaatgctcattgctatcgtgagtggaatgtgtttttacgccagcgtactcatggcgacgactccggcggttgagctggaattgcaaattcttaatgccatcttccttggtattctctgtggtatcggcatgctttattttcaggacttgatgcctgaaaaaataggctctgcgacaacgttatatgcaaatactagtcgcgtcggctggattatcgccggctctgttgacggaattatggttgaaatctggagctaccatgcgttgttctggctggcgatagggatgttgggtattgcgatgatttgcctgctgtttattaaagatatttaactcaccagtctgggctaagaaaaatcggcgtggcgcaaacagagccatcctcgccatttttgctatcatgcctgcatacataaacgacaaaacagtatgcagagggaaaaatgggttccaccagaaaggggatgctgaacgttctgattgccgccgtgttgtggggaagtagtggggtctgcgcgcaatacatcatggagcaaagccagatgagcagccagtttttgactatgacgcgtttgatattcgccggtttgattctactgacgctgagttttgttcatggcgataaaatcttttctattattaacaatcataaagatgccattagcctgctgattttttccgtggttggcgcgctaactgtacagctcacttttttgctaaccatcgaaaaaagcaacgcagccacggcaacggtgctgcaattcctcagtccgacgattatcgtcgcctggttcagtctggtgcgtaaaagccgcccgggcattctggttttctgcgctattttgacaagcctggtcgggacttttttattggtgacacacggtaatccgacgagtttaagcatctctcctgccgcgttgttctggggcattgccagcgcatttgctgctgcattctataccacctatcccagtacgctaattgcccgctatggcacgttaccagtcgtcggctggagtatgctgattggcggtctgattctgttgcctttttatgccagacaaggaacaaactttgtcgttaacggcagtttgattctggcgtttttttatttggtggtcattggtacgtccctgacatttagtctgtacctgaaaggagcacaattaattggcggtccaaaagccagcattttgagctgtgcagaaccattaagtagcgcgctactctctttgctgttgctggggatcacgttcacattaccggactggctgggaacgctgctgattctgagtagcgtgattttgattagtatggattcccgtcgccgcgccagaaaaataaatcgtccggcgcggcataagtgagaattaccagccaggcaccgcgccaccgttaaaaatggtttctgccgctttagcgacttcgggactttgataagattgcagaaattccttcacgttttctgcattcttattatcttcccgtgccaccaaaatattcacatacgggctattcttatcttcaataaatacgctgtcgtgcaccggagaaagcccggtctgctgaatgtaagtggtgctgataatcgctacatcaactttgggatcatccagtacgcgcgggagctgcgccccctcgagttccataatctgcaaatgacgaggattatcggttatatccagcgcggtaggtaataacccttttccctctttcagagtaattagcttctctttttgcaacagtaaaagtgcgcgaccaaggttggtcgggtcgttggggatcgccactgtcgcgccttcttttatttgcgccacggttttgatttttttggaataacccgccatagggaagacaaacgtatttcccaccgctaccagtttataaccatgcgcctgattatcttgttcaagaaagggtcgatgctggaagacattcgcatcaagttcgccatgatttgtcgcatcgttcggtagcaagctaccgctaaatcctaccagttcaacatcgaggccatatttctcttttgccacctttttagcgacttccgcgacatcttgttctgcgccatttataacgccaactttaatgtgttttgcatcgctgctactctggtcgcaacctgccagcagaattccggccagcaataatgcggcccctgtccgtagatgatgtgttgtcagtttcatttttttatccttttattaatgattacctgactatagcggtaaggtcgctgcggtttaaaaaacgaaacgctatcgataagaataaaaaggaataaaagtggaatataaagtctggcacttcttactgaccacgcaagcgcgtttcgtacagcatgatgagagcgatgaaagcaaactacacttatgcttcattcgatacacatttgtaaaaggttgaatccatgaaaccaacgacactactgcttattttcacttttttcgctatgccaggcatcgtatacgccgagagcccttttagcagtctgcagtccgcaaaagagaaaaccacggtattacaagatttacgtaaaatttgcacgccacaggcgagtttaagtgatgaagcgtgggaaaagttaatgttgagtgatgaaaacaataaacaacatatacgcgaggccatcgtggcgatggaacgtaataatcagagcaattattgggaagcgttgggtaaggtagaatgcccggatatgtaagaacagcaacaactactgaccaacgcttctttacctgatatcaggatttcttcattttcacctttgcagtaaccaacaatgcagtcagcaacatcaatgtgccggacaacatcaacgggctagtcagaccaatattatccagcgcataaccgccgattgccgcgccacaggtattagcaagctgaataaccgccacctgaatagacccggctttttctgcctgatcggccaggctgcgggtgatccacgtactccagccgacgggaaccaatgcaaaagttagcccccagataatcgccacgccggtagcaacgattttatcgcttccccacaacgtcagtaccaacgcactcacagccagtattaacggcgcgcctgctaaggccagttttacgctacgtttaagaatgaagctgctaaggctcgtaccaataaagctggcgataccaaaactcaacagcaccagcgttaagccatccacgccgaatcccgccaggttcatatacaccgggcgaatatacgtgaagaaagcaaactgcccggcgaaagacatgaagatggcgatcatccctgccatcacacccggacgttgtaataagcggaaagtattttgtttctgatggctgggttcgcctggcagactaggcaaacttttgataatccagaaaatacacagcacgcccatcaccgccgccgcattaaagacattgcgccaaccgataagctcgcctaaaaaactgcccaacggcgcggcaatcaccagcgcaatagaaaccgcgccgaagatcacgctcagcgccttcggcaccgtacgcggcggcaccagacgcatggtcaggctcgcgctcatcgcccagaacccgcccagcgccagccccagacaggcacgaccgattaaaagcaaactgaaactgttagcaaaggaaaccagcaagcaggagagcgtcagcaaaacggcaaacaaaataacaacgtagcggcggtcagtagcctgaattgtctgggtaataaacaaactggcaaacattgccacaaaggcggtcacggtcacgctttgcccggcaaccccttcgctaatgcctaaatcctgggccattggcgtcaacaaactgacgggcaaaaactcaacgataatcagacaggcgacacaaaacgccacgctgaaaacggcactccagttcggtcgggtgatggcatccgcgccgcggttttcggcaataaattcactcatggtgttacccgtggcatgtttcaggggaaaagcgctccactttaacatactaatgtgactcgcatttaacgtttttgcaacttttacggtgttgctactgctggagttaagatcgaaacggaacagggcaaagattaccggatgcggcgtgaacgtcttatccacccgacaggtcaggcgcggtctgtaggctgataagacgaaacggtttcaatgcaaccagtgaacgccctcggcaggctgaaagaacgcgttatagcgcatctgaaaagcattaatatcctgcatttcaggttcggtttcgcgcagaaaacctagcgccagcctgacctgagcgtcggtaatcggcgcggcgaggcgagctttttgtaaaatccgatgccattgcagcaggttctgttcgctaccatcgacaatgacaatttgccagatgagcaacacctgcgcggcgttttgcaggtggctctcatccggacgatgcaaataacgtaaaaattcgtcaccagcactctttcccatttgatcgaccatgctctccacgggtacgacatcgatgttcagccgatcgctgagacggcgaatcgcttttctggccccggatgtcagcacccgaaaaccaaccacaaacactaccgccagcgtggcgagcattatccagatcatgagttctcctgcgtaatcagaactcatgatatctggaaaccctcgccagttattaatccaccagaataatcttcagtgcaaacagagctgcgaccaccaccacacacaggttcagatcgcgccagcgcccggtgcatactttcatgatgcagtagctcataaagccgagtgcaatcccttcggtgatgctgaaagtaaagggcatcatcaccgtggtaataaacgcaggcacgctttcggtaaaatcatcccagttaacgcgcgccaggctgctagtcatcagcacgccaacaaagattaacgctccggcggttgcgtaaggaggaactatcgccaccagcggactgaagaacataaccaacaggaacataacgccaaccacaaccgcagtcagccccgtgcggccaccgactgccacaccagaagtactttcaatataggcagtaacagagctggtgccgataaacgcacccgccacgctactgacgctatcaacatacagcgccttattcatattggggaatttaccgttaccatctattaagcccgctttatcagttacaccaattaatgttccactactatcaaataggttgatcagcataaaggagaaaatgataccggcgagttcaagtgttaacgcgccgctcaaatctacttcaccaatgacgccgctaatatcaggcggaatggaatagacgccgctaaaatgaacatcaccgaaaaataatccacagcaagacgtcaccacaatagaaaccagcaccgcggcatgaaaatgacgactactcaacacggttataataaaaaaccctaaaatacctaacaacacgccgtgagaacttaaatcgccaatcatcaccagcgtgtctttattggcgacaataacgccagtattttttaatcccattaaggcgataaataatccaattccgctggtgataccaatacgtaaacttaagggaatgttggagatcatccagtaccggatacgaaacagcgtgagcaaaaatagtccaactgcgccccagaatattgcgcccatcccggtctgccaggagatgcccatcgcccccacgaccacgaaggcaaagaaggcgttcagccccattgccggagccagcgccacgggtaagttagcaaatatccccatcgcaatactgccgataccggcaatcaaacaggtggtaacaaacaccactttcgggtccatttgtgccgcgccgaggatttgcgggttcacaaaaacgatgtacaccatggttaaaaaagtggtcatccccgcaatcaattctgtgcggacggtggtcccatgctgaggtagtttaaataatcggctaagcgtcccactttcattactcacgtaatcggtattgtcattattcatttttttgtccattggaggagatttaatcccttgcttttgtaaaacaaatgacaacaacggttcagtgataattatcacatttcaattgcacattaatggatattctttaataatctcgcgacgtttctttatgataaataataatcaaattgataaaatcaaaatgagaaaaatatgaataattctattaaccataaatttcatcacattagccgggctgaataccaggaattgttagccgtttcccgtggcgacgctgttgccgattatattattgataatgtctctattctcgacctgatcaatggcggagaaatttccggcccaattgtgattaaaggacgttacattgccggtgttggcgcagaatacactgatgctccggctttgcagcggattgatgctcgcggcgcaacggcggtgccagggtttattgatgctcacctgcatattgaatccagcatgatgacgccggtcacttttgaaaccgctaccctgccgcgcggcctgacgaccgttatttgcgaccctcatgaaatcgtcaacgtgatgggcgaagccggattcgcctggtttgcccgctgtgccgaacaggcaaggcaaaaccagtacttacaggtcagctcttgcgtacccgccctggaaggctgcgatgttaacggtgccagttttacccttgaacagatgctcgcctggcgggaccatccgcaggttaccggccttgcagaaatgatggactaccctggcgtaattagcgggcagaatgcgctgctcgataaactggatgcatttcgccacctgacgctggacggtcactgcccgggtttgggtggtaaagaacttaacgcctatattactgcgggtattgaaaactgccacgaaagttatcagctggaagaaggacgccggaaattacaactcggcatgagcttgatgatccgcgaagggtccgctgcccgcaatctcaacgcgctggcaccgttgatcaacgaatttaacagcccgcaatgcatgctctgtaccgatgaccgtaacccgtgggagatcgcccatgaaggacacatcgatgccttaattcgccgcctgatcgaacaacacaatgtgccgctgcatgtggcatatcgcgtcgccagctggagcacggcgcgccactttggtctgaatcacctcggcttactggcacccggcaagcaggccgatatcgtcctgttgagcgatgcgcgtaaggtcacggtgcagcaggtactggtgaaaggcgagccgattgatgcgcaaaccttacaggcggaagagagcgcgagactggcacaatccgctccgccatatggcaacaccattgcccgccagccagtttccgccagcgactttgccctgcaatttacgcccggaaaacgctatcgggtcattgacgtcatccataacgaattgattacgcactcccactccagcgtctacagcgaaaatggttttgatcgcgatgatgtgagctttattgccgtacttgagcgttacgggcaacggctggctccggcttgtggtttgcttggcggctttggactgaatgaaggtgcgctggctgcgacggtcagccatgacagccataatattgtggtgatcggtcgcagtgccgaagagatggcgctggcggtcaatcaggtgattcaggatggcggcgggctgtgcgtggtacgtaacggccaggtacaaagtcatctgccgttacccattgccgggctgatgagcaccgacacggcgcagagcctggcggaacaaattgacgccttgaaagccgccgcccgtgaatgcggtccgttacccgatgagccgtttattcagatggcgtttctttctctgccagtgatccccgcgctaaaactaaccagtcaggggctatttgatggcgagaagtttgccttcactacgctggaagtcacggaataataaaaaaagcccggcgtcatgccgggcaaaagtcaccagttacgtttatgccactgtcaactgctgaatttttttctcgcggcggattttgcgttcttccattaccgccactatcgccatcaggcagatacaaccaatcgcggcgatatccagcgcggcgaaggtgcctgcccagccggtaaggccgaataccggcgtcccatcggcaatcattcccagacctaacttggcaaagctgtcaccaatcaggtaagcaaaggtgcctttaataccatcggcagcgccaatcgcttttttaggtacaaagccaacagcagccacaccaatcaacaattgcgggccaaagaccaggaaacccaacgcaaagagagaagccagatagatatattcgttactggcatgttgatacacaccgagcgtggcgataatcagcgccagcgcgatgcaggccaccaggccacggcgaccgttcgccaggtcagagagccagccccacagcagcgtaccgaccagcgcaccagcttcaaacagcgtaaagccctgaatcgccaccgctttagagagtttcagttcctggaacgcgtatacggtactccactggtcgataccaatacgtaccacatagaggaaaatgttggcgaagcacagcagccagatcactttgtttttcagcacatactcaacaaagatctgccacttggtcatatcggtagattctgtctctttgtcctcttcgctgatctcctcgccgaacagttcttcagctttgccgaggccataagattccggggagtcgctgccgtaacgcaggccgataaaaccgacaatcagcgcgataatgctcgggaagataaacatgccgatgacatggccatcgaacaggtaatttgccccgaacagcgccacacctgctgcgcctgcaccgccaaggttgtgagaaatattccagaaaccgaggaatgtcccgcgtttacgacgcggcgtccatttggtgatggtggagtaactgcagctaccgccggtactctggaaaaagccgcttaaggcgtagaaggcaatcatcaggaacaggctaacgctgccgctgcccatactggcactgaagcccagcatacaaatagcagagaggatcagcatgaacggcaggaattgtttggtgtttttgccgtcggcgtagtaggaaaccagcgttttacccacgccataagtgatggagaaacccaggccgatcatccccagctgcgtcatgctcaacccgtaggtgctaatcatatcgttctgcgcgatgttaaagttcttgcgaatcaggtacatcgtcaggtagccgataaagaccaccaggtaggattgcatgaacggtttgaaccacattttgcgccgcacttcgagcggaaggtccagggtcggcttgcgaacctggtttaagaaagccagcatgggttactcctgaaatgaatacctgcgtgaggcatgcattgtaaaaatcagcagcaaatcaggcctgagatagcgtccaggcaaaacctggaaaatttcttagttttgccggatatgaagtgaaaaggtgagatgcatcacgcttcgcgcggtgtctgggcgttcaaaaagggcagtaacagcagtgcggaaatcccggcggcgatagagataaccacaaaaaatccgctccagtgccaggtatcgagtactttcgccagcggccaaccagcaaggctcgcccccagataagcaaacaagccgacaaaccccgtcgccgcccctgccgcctctttgtgggaacactctgccgccgccataccgattaacatctgtgggccaaagacaaaaaaaccaatggtgaagaagcaggttgcctgcatcacgtagctggcaaatggcatcagccacagggagccgacactaagcaaaattccggcggcgaaaatcaaattcatcggccctcggttgccgttaaacaatttgtcgctgccccaaccggctaccagcgcaccgataaatccgcccagttcaaacatcgtcactgccgtattcgccgtgaccagatcgacgcccagtgtctcggacatatacaaattgccccagtcgttgatcgccgcccggaccacatagaccagcacatagcaaaagctaagcagccagatatacggattcagcaacacatatttggtgaggatctctttacgcgtcaaccctgccccttcttgttgttgagcaatttccagcgcgtcgtgtcgccattcaccgaccgccggtaaacctaacgcctgcgggcgatcgcgtagccgccagcagagaaaaatccccacgactatcgccatacaaccagcaatcatcatcccggcacgccagccgtaatgcagcgcagccgctgccatcacaatgggaatgagtgcgccgccgacgttatgcgccgtgttccataatgcccaccaaccgccgcgctcggtacgactataccaggccgttaacagacgcgcacacaccggactaccccagccctggaaaaaggcgttcagcacccagagcacggcaaacgcccataggctcgtgctgaagccaaacagaatgttgataatgcccgtggcgataagccctatccccataaaataacgggcattactgcgatcgctgacaatgccggagacaaacttgctcacgccataggtaatgtaaaacagggtcgctaacaggccgatatcgctacggctgagcacgccgttagcaaggatttctggtacggcggcgttaaaacttttccgcgtgaagtaaaacagcgcgtaacccagccagatggtcagcagaatatgccgacgccagtagcgatagcgggcatcaatttcatatttatcagtcattaatggcgcatcggcaggcgctttcagaaacggcaacatcatcaaaccttagacatagcgttgaggtagagaaacgctgacacgcgtgccgtgcagacaggaaatgtgtaatgtgccacccagcgccgttacgcgctcgcgcattccggtgaggccaaaaccttgttgcccggaacccggcggcaaaccgctgccatcgtcttcaataaccagcatcaaccgttcatcctgctgccagccttgcagggtgaccgcgctggcatcagcatgtttcacaatgttgttcagcccttcctggcagacacgaaacagcgtcacgcgctggttttcgcttaacgcactttcatcgattcgccattcgagatggctgacaataccgcgcccttccagctccatttcccgcatcagactgcggatggcctgctccagggtgagatcatccaactggcgcggacgtaaccgacccaacaaacggcgcaccgcgtcgtaaacgcccaggcttagttgttcgatgagctgcccgctctgcttcacgctggcgttatctgccgccagccgctgaacaatgcccgcctgagtacgaatagcagtgatggtctgaccgatatcatcatgcagctcacgcgccacatcacggcgcacgctctcttcggtttccagcaaccgttcagccagatgctgattgcgcgccagttccttttgcaggctctggttaagttcacgcaaccgctggatgccagcgccaagcaacaaccctgtcagactttgcaccagcaggctgagcaataaatccaccggatgatcgcgccaggtttgactggcgatcagcgcgatggcgttcatcaacgtcgcaatcagcgccccttgccaaccatagtgccaggccagcgcgataatcggcagcgccagacagaatggcgtaaagcggctcagttcgtccggcaatcccaactggagccagagactgataacaaacagcagcaagtaccagaccagatgtcgcccgcgccagttgattggctgagaaaccagactcggaccgagcggcagccaggtgttattggcgagatagtgccagaacaccagacatatcggggccagcgtcaggccgccagttaaagtcagcaacagcgcattccagctctctttgccgtgccaaagccagggcaggctctgcaacaacgccgccgccgttaacgccgccccctgtaacagcaaggtgcgccagtcacgctgatggcgatagcggctgatcagcgctacgggcagtaacgtcagtaaactaccgatcatcaataacggaaaatgggttaaaccgaccgcctgcgttagccagtaaatcagcagccactccgcgcccagcaatacgggccagtatccgcgcgggcattgcagcattagccccagacgcagaccaaacggaaataacagcaccgccatatcagggcgctcaaccagatgcaggctgatactccacaggcaaaaccatgcggcagagaagataaaaaagcaggcaataacggtaattaagcgggagaacaacgtcttcatcaccagccatcaaacatgcggcgcgccagctctacgtcgttactgacgcccagtttttccatcagattggcgcgatggacgtgtaccgttttcggactcaagcccagttcggcggcaatctctttcaccgccattccttgcgccagtttttccgccacctggcgttcacgtttggttagcgggtcctgacgaccggatgccagtttaatggcaatatccggcgtcagataacagccgcccgtggcaaccgtatgcaccgcagcaatgagttcatccgggctacagcgtttggaaagaaagccgcgtgcccccgcgttaagcgcctgctcaaccagcgcaggactgtcgtgaacggagagcataatcgtcgccatacctttcggcagctggcttagcagctccagaccggagatatcgggcatggagatatcgcaaatacacacctgcacaccgcgccccggcagccccgccagcgcctcgcgcccgctaccaaactcggcaactacctgcaaatcaggttccagccccagcagctgcgcaaagccggagcggacgatgaggtgatcgtctataagggcaacggtgatcatggtcttgtcctggcgggtaaaaaaaatacgcgcttaccttaacgataagcgcgatgttgttcaagccttgagcggttactgaaaaaacaccgcgatcttgttaaacatcgtcggatcggactgattacgctgcactttcacgacatcttccagcttatcgatttggcttatcatctgctccagacgctggtcgtcattgaccagtagccagatatggcttttgtcgctgtcctgaatcggcagacaaagaatgccttcaacgttaaaagcgcggcgggcaaaaaggccacaaacgtgggtcattacgcccggatggttgcgaacggtgagctccagaattacgttgtcatgagttgtgttttgcatggcttattcccccaccatttcagtattcgccgcacctggcggcaccatcgggtaaactttttcttcggcatcaatgcgcacatggatcagcgccgggccagggcgattgatgatttcctgcaaactagcctgcggatcggcttcgttattcaaatcacaggtttcgaggccgaatccggcggcaatctgcataaagttgattttgcccggataggtggcggcaaaaacgccttgctcgtagaacagactctgttgctgatgcaccagccccagcgcttcgttgttcatcagaatgattttgacatccagctgattttcactggcggtcgccatctcctgaatattcatcatcaggctgccgtcgccggagaaacacaacactttgcgatccgggttcgccagcgcagcgccaatcgccgcaggcaggccaaaacccatcgtgcccagcccaccggaggtcagccactggcgtgggcgattgagcggataagcttgcgcggtccacatctgatgctgaccaacgtcggtggtgataattgcattgtcatcgacacaggcggcaacggcgttgatcaggccgtaatggcttaacggatcgcacgctttcgggattggacacggaaactcacgctgcaaatccgctaccaactggtgccactctgcacgcggttgcgcttccaccagcgggatcaactgcgccagcacgtcatcaacatccgcctgaatcgccacgtgcggctgcttgattttacccagctctgcacggtcgatatcgacatgaatgattttggcattcggacagaactgctcggttttgccaatcgcccggtcatcaaaacgcgcaccgagcactatcaacaaatccgcctcctgcaaaatatagttggtgctgcgcacgccgtgcatccccagcatacccaggctcaacggatgcgcttttggcaacatgcccagcgccattaaagtcatggtggtaggcagttgcgctttctccgccagttcacgcacccgtgcgggcgcattgatcacaccgccgcccagataaagcaccgggcgtttggcagcgttaatcatcgccgctgcgtcacgaatgctttcttcgctaaaggcgggggcggcggctttttctgccatagcgggctgtgtttcaatctcaaaaactgccgtttgcacatccttaggaatgtctatccacaccgggcctgggcggccactttgcgcaatgcggaaggcatcgctcatgacctgcgggagttcttcgatatgtctgaccagatagttgtgtttggtgatggggatagagatgccgtaggtgtccacttcctggaaggcgtcggtgccgatcatgctggcgggaacctgaccagtgatgcaaatcagcgggatggagtccagccgcgcatcggcaatggcggtcaccaggttagtcgcacccggtccgctacaggccatacagaccgccggtttaccgtcggtgcgcgccattccctgagcgataaagcccgcgccctgttcatgacgggccagaatatggcggatttgcgtgctttggcttaaggcatcgtaaacaggcaggatagaaccgcccggaatgcctgtcacaatcttaatgccctgctgttccaggaaatgaacgataaattctgcgccggtaaagcgcttacgcgtgcttgttgtgccgctacttgccatgctccagtccttttcttctgggccgactttccgggaggtgcttaaacgaaaaaccccgcccggtttgcgccggcggggttttggaatcgtgtgttgttccagtccttacggcgcattgccgacgaccaccaccacacgcacgacgaccactgcggcggatggcgcagttggtagtagttttgcgttgagcatggaagtagtcattggggaccttgttggttttgtgtttaacaatatttatacaagcacagctttacaggggagacaatggaaaatttttcagcaagggaaaattgaggggttgatcacgttttgtactgaattgcagataacaaaaaaccccgccggagcgaggtttcgtcagtcgcctgcggctggtaaccgcaaagcacactgtattatgtcaacactgaaagtatacgtgttccgcgcagaacgcgcaatttcggcacgaattttgacgtatttagtgcatagttgagtatcgatcacagtttgcgttttgtccaaatattactgtttatttatacagtaaacttctataatatcactgtacgcaatgtgttatgcgggggccgcatcgttacccggcgcactaagttctggctgaaacgggtggtgccgtcagcgccttaaccccgcgtgagcacactgtgttatgtcaacaagcacaacgtttctccttgagataccgcgtgcacaacagctggcaacaggcagcggaaaggtacgtcagctggcagtgctcctgaaccacaggagacgcgtatgaacctggtggatatcgccattcttatcctcaaactcattgttgcagcactgcaactgcttgatgctgttctgaaatacctgaagtaattcagattcaagtcgcaccaaaggggagcgggaaaccgctccccttttatatttagcgtgcgggttggtgtcggatgcgatgctgacgcatcttatccgccctaccatctctcccggcaacatttattgccgcttttgtttacatattctgccgctaaacaattccccattcctggcgtatatctggctaacattcatcaatgtgatagattcctctcccgcatttatgggaatgcgtagtgacttattctaattatttttataaaagcatccgtgataatgaaaaggcaaagaaacgtcaatttgttattgatgttggtattactcgtggccgtcggtcagatggcgcaaaccatttatattccagctattgccgatatggcgcgcgatctcaacgtccgtgaaggggcggtgcagagcgtaatgggcgcttatctgctgacttacggtgtcagtcagctgttttatggcccgatttccgaccgcgtgggccgccgaccggtgatcctcgtcggaatgtccatttttatgctggcaacgctggtcgcggtcacgacctccagtttgacggtgttgattgccgccagcgcgatgcaggggatgggcaccggcgttggcggcgtaatggcgcgtactttaccgcgagatttatatgaacggacacagttgcgccatgctaacagcctgttaaacatggggattctcgtcagtccgttgctcgcaccgctaatcggcggtctgctggatacgatgtggaactggcgcgcctgttatctctttttgttggttctttgtgctggtgtgaccttcagtatggcccgctggatgccggaaacgcgtccggtcgatgcaccgcgcacgcgcctgcttaccagttataaaacgcttttcggtaacagcggttttaactgttatttgctgatgctgattggcggtctggccgggattgccgcctttgaagcctgctccggcgtgctgatgggcgcggtgttagggctgagcagtatgacggtcagtattttgtttattctgccgattccggcagcgttttttggcgcatggtttgccggacgtcccaataaacgcttctccacgttaatgtggcagagcgttatctgctgcctgctggctggcttgctgatgtggatccccgactggtttggcgtgatgaatgtctggacgctgctcgttcccgccgcgctgttctttttcggtgccgggatgctgtttccgctggcgaccagcggcgcgatggagccgttccccttcctggcgggcacggctggcgcgctggtcggcggtctgcaaaacattggttccggcgtgctggcgagcctctctgcgatgttgccgcaaaccggtcagggcagcctggggttgttgatgaccttaatgggattgttgatcgtgctgtgctggctgccgctggcgacgcggatgagccatcaggggcagcccgtttaagcgcacgtcaccgcagcatcgtcatcagctccatgggagaacgatgctgctttatcagatcacgcatcacccgcatatgcggtgcggagtaagaataaaacgcctgatagcccgcacaaagcacgctgtctggcgtctcctgccgagcgtgcgggcacaggcgatgccagtcgcacgcctggcagtcacagcgcggttgcgggttttcgctgccacaccatttttgtaaggtggcgtcaaaaagctcaatgctgatacgactgatatctgcccgcacccaacactcgaacagggcaattaaaaatttcccccacagctctgctgtcacgctagcggccgtcagatcgccccggtcatcaaattcaagatagggaatgagctgtacggagcggatgccccgctgtttgaaattgtgataaaaatcggcaggttgcagagcatccttgtactctacaaccagtttatgcctgtcctcttcagcatcaatgacctgacttcctgtcatgcgactctctcaataaatacgataagttgatgtatatgcgttacagcaaacagtattgcgagagataacaccgcgagggagatcaaaaatttgtcacggactacgtgaaattgggaaaaatcgctattcgtgacatccattaaattgcgattacgggtgtagtgccagaggatcagcgccacgatggcgagaatgccaatgctaatccagaataacatgcccgcctggtgccagttgtgtttgatagccaacgccatcaacgcgccgtagcccagcatggtacgaaaccacgccagacttgtgcgctccggctgcagtcctgggtcggcaatgcgtctggctttgcggctatccggcatacaacaccagtcccataacgttaattatccggcatacaacaccagtcccataacgatcaccgccacgaccatcaatattaagctaatgattaataagctgttggtgtagggcaggtcctctttcagacgcatcgctttttcattgcgtaaccagcgcaagtagccatacatcgctaacccgccggaaaacagacacaacaacaacgccagcagttcgcgaatgacgggcgtggcgaaatctggcgcaagttgatcaagcccaacccccgccgccagaaatcctagtgcagtacggatccacgccagaaaagtacgctcattagccaggctgaagcggtaatcaggcgcttctccgaggcgggaaattttcattgttgctcctttgcaatttcactaacgctctacctttagcggtttttttaagaatttcgtccgcccgtttcctgatatgcttttgccatccgctacaaggaggtcagatgggtatcatagctcaaaataaaatcagtagtttgggcatgctgttcggtgccatcgctttaatgatggggattatccactttagtttcggccctttctccgcaccaccgccaacgtttgaaagcatcgtggcggacaaaacggctgaaattaaaagaggtcttctcgccggaataaaaggcgaaaaaattaccaccgtggagaaaaaagaggacgtagatgtcgataaaatcctcaatcaaagcggtatcgcactggccattgctgcgctactttgcgcatttattggcggtatgcgtaaggaaaatcgctggggcattcgcggcgcgctggtttttggcggcgggacgctggctttccataccttgctttttggtatcggcatcgtgtgcagcattttgctgatattccttatcttttccttcctgaccggcggtagtctggtttaagcagcctgaataatgcccgccgggtgatcatcagcgggcattatcgtcagaacttctgttttttctcctccaccttcaccccttgtgtcggtaggccggtgtcatagtcgcgtacaactgggctatagccatcttgtggacgtggacgaaacgcccccatccagcgcggccgtgcatctttacgccacggacgcagactccattggtaactgcggaacggatcgcgaattttgtccatgtaatccaataaggcgtcatgcattttgctgcgaacgtctgcaaaacggatatcatcgatcaggttatgcatttcatttgggtcattacggcgatcgtaaagttcatcactggtgaagaggttgagtaccagtttaaagtcatccgtcacccagcaacgcaccggaataaaaccgccaaagctgtcatgctcaatctcgtagcggttaaattccaccatcacgccgcgtggctctttcacggcaaggatattttcccccggcagaatctctggtttttcaatatctgccagcgccatcattgtcggcagtaaatcgatatgactgactggcgtatcgacctgtcgccgctccccttgcgggctacggatgatcagcggaatgcgggtgatgtcgtcatacatcgccgcccctttactgatcagcttatgtgcgcccatcatttcgccgtgatcggaggtataaataacccacgtattttcacgttgctctggcgttaaggcattgatgacccgtccgatttggtcatcaacaaagtcattacaggcaaaatagagcggatggtgataaagcccgtcatcaccgactgggcttggcatcgcctgcgcccataagcggtgatgttccggtttgttagccaggtcatcctgtgctttctcgcccagctcgtagtaaaaatcagcgtatttctctaaatactccaccggacaggtgaacgggtgatgcggctcatcatagctaaccaccatcaggaaaggctcgtctgcgcgcgcaggctgttgcagaaaatccaccgcccgattgctgatacgatgcgcccaggtgaaggtttcgtcgatatggttcgcctgtaaatcttcgacgctgtttaggccattgcgccacaggctaatctctttttccgtcagttcgctaagatagttcgccccatcgaaccagtaatcagcgtcccactccggcggacactcgccagtgccgaaatagtcatgaccgtcgagatgccatttgccgatgtaacaggtgtgatagccggcatccttaaagtagcgccccatagtggagatgtttttgcctggcgcgacgttgttggtccacgggccggactggttagcgtagataccggtaaatagtccggcccgtgcaggcgtacaaaccggactacaggtgtaggcggaattaaagcgaataccttccgccgccagactatcaatattttgcgtattcagcggtttaccgctatagcaaccgaccatattggtggcctgggtatcggtcatgacgaacagaaaattggggcgtttcataggctatccttcccgtcgggagtaaaggttacggctgggtcgtgacgatgccgccagctgtcaaaaatcaggtagacaatcactacggcggcaatgaaataactgatcatcgctaaccagcgcgtaccgtagccgccgaattcagccagcccggcatagacgccaatcatcgcgaacaggatgccaatactcgcgatcttgacgtttttccacggtttcatgtccaccgcaaacgcatctttgaaggtgaacggcgtggcgcgcggtttgataaaaccgatcaccagcatcacgaccacgttgatgcagaacgtacaggccagcacatagaggaaatggaagtcgaacttcaccagatagttgatggtgatgtagctgattatgccaatccccatcgctacttttgccgccagcgccgggatgcgcgggaagaaaaagcccataatgatgatggtaaccagcggcacgttgtaaatgccgttgagctgtttcatccagctatacagcccctgcggcgcgttggcgatccacggcgcgaccagcacgctaacgatagcgataaagaaaccaaatttgcgcccgacggtgaccagctgctgcggctcggcattctggttaatgatgcgacggtaaatacccatactgaataacgtactggcgctattcagaaagccgttgaaggtactgatcaccgcaccaaataacaccgcgccgaagaaacccaccattggcactggcagaacgttattgaccagcgtcgggtaggccatgtcggctttcggtaaatcctgatacagatgaaacgcaatcaaccctggcagcaccagtaccagcgggtcgagcattttcagcaccgccgttaacagcgcccccttttgcccttccgccaggcttttactcgccagcgtgcgttgcacgatgccctgatttgtacaccagtaaaaggtgttcaccagaatcaaaccggtaaatgccgcgccaatcggcaagggatcggtcgggccaccgatactgtttaatttctcggcgtgaacggtggtgagttgctcaatgccctgcataaagctgcccttgcccatcgcgattaggccaaataccggcaccatcaacccgccgataaccagcccaataccgttgatggagtccgccactgccattgcgcgcagtccgccgatcaccgcatacaaaattcccgccagaccaagcaaaattaccagtagccagatagccgcaccgtgagaaatctgtaggctttccccgacgtgaaacaggctgttgagcgccaacgcgccggagtagagaacaatcggcagaaagcagacgccggtggcaattaggaagcagaagtcgatgataatacgcgtcgttttatcataacgttcctccagaaaatcggggatggtggcaatgccgcgcttcagatagcgcggtaaaaagattagcgcgaggaagatcagcgtcaccgcactagtcacttcccagcccatcacgctcatgccgcttttgtaggcctgcccggaaaggccgaccagttgttccgtggaaaggttggttagcattaagctagcggcaataaccggcgcttttagactacgtccggcaagaaaatagccttgttggcttccggtatctgttttgcggaccttccaccaggtgatcaccgccaccagcagcgtaaaaccgacaaaactcaagatttgtaagctattcatctcatagcccttatttatgtttatgtcccggacgcatgaatatagggagaggtaaaatgcgtcgggtcaggcagtcagattcttaaaatacaaacgtcgtatccctgaacggattgttttctgttaagttcaggttgtgagcataattcgccggagggatattaaaatgaatggaaaattgcaaagtagtgatgtaaaaaacgaaactccgtacaatattcccttattgattaacgaaaatgtgatctccagcggaatttctctgatcagcctctggcatacctacgccgacgagcattaccgggtgatctggccgcgggacaagaagaaaccgcttatcgccaacagttgggttgcggtgtataccgtacaaggatgtgggaaaattcttttaaagaatggcgaacaaataacactgcatggcaactgtattatattcttaaagccaatggatattcactcttatcactgtgaaggtttagtctgggaacagtactggatggaatttacccccaccagtatgatggatattcccgttggtcagcaaagcgttatttataatggcgaaatttataatcaggaactcaccgaagttgctgagttaataactagtccagaagcaataaaaaataatctggcagtcgcttttctgacgaaaattatttatcagtggatttgtcttatgtacgcagatggtaaaaaagatccacaacggcggcaaattgaaaaattaattgccactttacatgccagtctgcaacaacgctggagcgtagctgatatggctgccacgatcccctgtagcgaagcctggttgcgtcgtctgtttttacgctataccggcaagacgccgaaagaatattacctcgatgcgcgtctggatctggcgctaagcctattaaagcaacaaggaaacagcgttggcgaagtcgctgatacgctcaacttcttcgactcctttcatttcagcaaagcctttaaacataaatttggttatgcgccgagtgccgtgctaaagaatacggaccagcacccaacggatgccagtccacacaattaacgtaactctggccagtacgctttgttggcctccagcaactcatccagaatagctttggcgacgctggcgctcggtaccgttttgctcaacgtaatcgcctgccacaggtgctgataactacgctgttcccaggcgtccacgaccagtttttccaccgccacttgctgactcattaaccctttctgaaactgcgggatatcgcgctccaccagtggttcaggccgtagtagcgcacgcgcatctgtttgcgatcttgcagcccaacaatttgcgccatccggctttcaataccgattggcatgtcacagatgttgaggattttcgcattcgggcgcagacgacgcgtggcttctgcgacaatggctgccgggttggagtagttgagcatccaggcatttggactatatttttccatataatccaccagttccaggacgccgccaatggaacgcatgccgtacgctattccgccgggtccgcaagtttcctgaccaacaacgccgtggcgcagcgggattttttcatccagttcgcgcatcgggtatttgccgacgcggatgtgcgccatgacaaaatcaacgtcgctgaatgccacttcaggatcggtggtgtaactaaacgcaatgtccggcgctttttctttaaggatgactttacaggcttcggcaatcacttcctgccgcgcaccatcgttatcataaaatttcagtgcacgaagcgggaaacggtcctgattcgccaggagcatcaacacgatgcctggcgtaaaggtgcttccaccgcctgcgacaaccacactgaatttggtcattatactgcctccgtaatggcaacattttctgcactttgatgagaattaattaagctatcgagctgttcacgcagctgagatacatgcagaccaatgatcacctgaatggcatcgccactacggaagacgccgtgcgctcccagctttttaaagacttcgtcatccagcgtttgactcatgtcatgcagtgcaatacgtaaacgcgtcgcgcaattgttaatgctggagatattgccgaccccgcccagggcttgcaggataccggcagcctgatccagctcttttttttggctctgccgcggtggtttggcctcggctggctttgtattcggctttactgtagagtttcacttccgcatcttcacgtcccggcgtgcacatgttgaactgcagaatcagtgtgcggaaaaccacgaagtacagcagggtaaagcacaacccaatggcgatttgggtcagcatcatatccgcgtggttgctgaacatcgggatccagttttgcggtaaaacttagtcaatcagacctccgcccatgttgcccaccacaccaaagagatacattacggtgctcatactggccgccagcacggcgtgtaccgcaaacagcaacggactaatgaacaggaaggtaaattccagcggttcggtaattcccaccagcatggcggttaaggttgcgggaatcagcaagcccgccacttttacccgattttccggtgcggcagtgaagtacatcgctaaagaaatgcccacggcaccaaagattttactgttaccgtgcagggcaaaaccgccttccgggaacaagcttttcagcggctcggcgctcaaactgaactcttgcagatgctgcgcccagtacatctgaatgccgccttcaacagctgccggaccaaagataaactgtccgtagatgaagtggtgtaaaccggttgggatcagaatacgttcgaggaaggtgtaaacccagaccccaagtgcacccgcgctacgcaggaacgcttgcagagattcaatccccatttgtacttttggccagccgagcaacgtcagccaggcacaggggatcatcaccaggaaggcgataatcaccacataagacgtcccctggaaaatgccgagaaaaaccggcagttttttatcgaacagacggttatgcagcgccgtcacaatgccggaaatgataattgcgccgataatgctggtatcgagggttttaatcccggccatcattgtcagaccgctacctgccaccgcgtcctgagtgaaatcgacgccgaagtagcttccccaggtcattcccatcgcgttgatgaaatagttccaggtcaggaaactcaccatcaccgccagacaagcacgcccctgcgcttgcttagcaaggccaatgggtaaaccgacagcaaaaatcagcggcatattacggaataccgtccaaccgccctcttcaataatgtgtacgatttgcgcgaataaactgttcggatcggtcagactttccccgacaaacatcgggttttgcagcaagatggcaagacccaccacaatcccggcgaagggaaacagcagcactggcgtgaacatcgcgccgccaaagcgttgaatttgactgagcatttccacatcctcttttctcaattctgtaagtaggaagcctgattggttatgcggcaggcctggagcgaggataggaagatgcgatcggcagaacatgacgacccaatgggattcgtgatcgctttcatgcttttcgttgggcggtagagatctacgttttcgcgaaaaagtagacctctgtgagcacaggtacacagcatcgaacacatctttaaaaaaaagatgttttttcaatcgattaagcagaacttgtgtgcgcattacccgggcttgcaggcaaaaaagagatctagagatgatctacaaaagcattgcggagcggttaagaattcgacttaactccgcagatttcacgctaaacagccttcttcccggtgaaaaaaagctggcggaagagtttgcggtaagccggatgaccatccgtaaagccattgacctgctggtagcgtgggggctggtggtccgccgccacggtagtggcacttacctggtgcgcaaagatgtactgcatcaaaccgccagtctgaccgggctggtggaggtgttaaaacggcagggaaaaacggtcaccagccaggtgctgatttttgaaatcatgcctgcgcctccggccattgccagccagttacggattcaaatcaacgagcagatctacttctcccgtcgcgttcgttttgtggaagggaaaccgctgatgctggaagacagctatatgccggtaaaactgttccgtaatcttagcctgcaacatctggaagggagcaagtttgaatatattgaacaagagtgcgggattttgattggcggtaattatgaaagcctgacgccagtgctcgccgatagactgctggcgcggcaaatgaaggtagcggaacacacgccactgctgcggatcaccagcttgagttatagcgagagcggggagtttttgaattatagtgtgatgttcagaaatgccagcgaataccaggtggagtaccatttacggcgactccacccggaaaagagttaaccgatactccagaagagcaccgccagtaattggggggtgataatgcgcaggaacattaccaacggatagacagtggcgtaagagagcgccgccgcaccgctggttggatgaagattattagcaaacgccagcgccggaggatcggtcatggaacctgccagcatcccgcacatggtcaggtaattcattttggctaacatccgcgccagaatgccaacagtaatcagcggaacggcggtgatcagggcaccataaccaatccagcttagcccttcgccattgaccagggtattcacaaaatccccaccagatttcagaccaacgacgctgaggaacagcacgatccccagctcccgcagcgcgaggttggcgcttggcggcataaaccagtacagcttgccgatactgccgatacgcccgaggatcaacgccataatcagcggtccgcccgccagccccagtttcaacgcggccgggaatcctggcacaaagacgggaatagaacctaacaatacgcctagcccgatgccaataaacactggcagcatctgaacctgttgcagtttttgctgcgcattccccagcacattggcaacggcatcaattgcggacggacgccccaccagattgaggatatcgccgaactgcaggctgatatcgccactggcgaccagttcgaccccggcacggttcaggcggctgataacaacgtcatagcgttctttaaagtgcaggtcgcgaatacgttttccgagcacgttttcattggtgaccaccacacgctcgacgcgcaaatcagtgcctttcgtggacaggctagtatcgacctcctgaccaatcaccagttgcgcattatgtaaatccgctggctgacccaccagatgcagcaaatcgcccagttggataatggtatctgggctaggaacttttagggtttcttcgcgtttcagacggctgcagataattttgtcgccgttgagaatcggtacatctttaatggctaaatcatgcaggttagggttctcaacgcgaatattgatagtcttgatcagcgcgccgccattggtgcgactagactcgtgctgctgagcttctgtctcgacattgacgcggaaaataacccgcaacatccacatggtgaacaaaatcccgcaaatgccgaatggatacgccatcgcgtaactcatccccatctgatcgaccatttccattggtgtacccaggtcgcgcaaaatctgctgccctgcccccagcgctggcgtattggtaaccgcaccggagaaaatccccagcactaccggcagtggaatatcaaacagtttatgcaggatggcggtaaccagaccaccgatgatgacgatcagaacagcaaacaggttgaggcgtaatccggagacgcgcaaactggcaaagaagcccggccctacctgaatcccgatagtataaacgaacaggatcaggccaaattcctgaataacatgcagcatatcgctacttaatgtcatccccgcctgagaaacaaaatggccgacgatgatcccaccaaacagcacgccgccaatacctaatcctatgccgcgaaatttgacgttgccgataaacaaaccgacgactgccaccaaagccagaatactgaccgttaatgctatatcactcatcgtccatttctcttgagataacattttaattgctacggattatggctgaatcggtgaagcagatttgccttatagcgcacattatcacgggaaagaacgtgccgaaatatcttaaacagtcgaaatttaacgcattgttgagtaagtaagacaaaaaaagccccaccagaatggcggggcaaagagaatagctagttagctatttaacgcgggacgttcgctgatagcgatacgctgcgctgcgatgggttcaggctcattacgaattaaatcaatatgcagtaaaccgtttacgaaggttgcgccagagacttccatattttcagccagcgtaaagctcaggctaaatggctgattcataagcccttgatgcagccattttttctcttcttttggctgctccggcgtgccttttacgctcaggcgcgtaccttccagttgaatctctaaatcttcctgacggaaacctgccagcgcaagggtaatgcggtagtggttatcgtcgcttttctcaatgttgtacggcgggaagctctggctttcaccggcgttttgcagtgcgttggccagtttgtcaaaaccgatccattgacgcatcagtggggataaatcgaagttacgcatagtcatttctccttctaagaagcgagtaagtacctgcaaatccgaagattcgcatatgctccctgacggcgagcatggagatgtcaggccgcgccaggcggccttagggaattagttgatttcgatacggcgcggttttttcgcttccggaatcacgcgttcgagatcgatatacagcaaaccatttaccaggttagcaccacgaacatgaatgttctcagctaactggaatttgcgttcaaagttgcgttcagcgatgccctggtacagataggtgcgctctttttgttcgtcggcgtgagcacctttcaccaccagcagattatcctgggcggtaatttccagttcgctctcagcaaaaccagccacagcgatagcaatgcggtaatggttttcgtctaccagttcaacgttatacggagggtagccgccattactctggctctggttgttttctaagtggttaaacaaacggtcaaatccaatagcagaacggtaaagcggggataaatcaaagttacgcataatcaatagctcctgaaatcagcgagaatgtaagaccttccacaatggacaggtcaggtagccagaacacccatcaggcgcgtcctcatcggctacgatgtaaaaatgggtctggaaatgaacttttcaagccttatcagcggacttttttttgcagtttatggtctattgcatagactgagggggcagcacgaaacgttaaagtgcgatagccgccacagtgcgacgtaatgatgatgttattttcagcaagggatcgctataactcatcaggccaacacccacgatcaacagatgaatttattatgataagaaatgtgttgttagcgttcatgatatgcagcggaatgacattactcggaggatgctccagcgtgatgtcccataccggagggaaagaaggaacgtatcccggcacccgcgccagcgcaaccatgattggcgacgatgaaaccaactggggcactaagagcctggcgattctcgatatgccgtttaccgctgtgatggacacgcttttactgccgtgggatgtgttccgcaaagacagcagcgtgcgcagccgcgttgaaaaaagcgaagccaacgcgcaagccaccaatgcggttattccaccggccagaatgcctgataactgatttagcgatcagtttcggtgatccacagctggccgccttccatccacgccagccactgaccatccgggctgaagaccacggcgtccgcagaaggactattggcgtggtgttcggttaaatactcaacctcgccgctttgcgcatgggcacaagcaattcgattatccagcacaaagcccaaccattctccactcggatgccagttaaatgcagactgaatatccgttttgttatgggttaactggcgcggctcgccgccctgtgggctgataagccacagttgcacaatgccgttatcatctcgcattaaaaacgcgatttgtgtaccctgcggattacagcgcacccagtggcgcgggacgttgactaaccccggataagcccgatggtgggtaaaggttaaacgtcgctgcacgacgccacgcggtggcgcgggcagggttgtttccgttccgcttaacggcgcatcacctgccgctttccagccagcttcatcttgcggtaactcaacgataaacagctccggcactttctcgccctttgggctaagtgtgtcgccaataaatgccagcgcgtgatttcctacccatccttcttcataagcacgattgatttcatcactgccaggctgtggcgtgggcgtggttttgctcaccagcacgcaccagtggctaccgctgtattcacgcggatgctgcttttgtacgttgaccgggccaaacggcgcagcaacaccgacgtttcgcaaatccagcgccggatcgagttcatgcattacatggtcgttataggtaaagctcaccctttcaccgttcgggctaaagacatgcacatggctgccgccgcgcagcactcctggcgtatacggcgcggtaatatccatcgcatcaaggttactcatcttgccgccttcaacaatcactccgcgccgatgatggaagtcgtaatgccatgtttcatcaggattttccgggccgtggatgaaaacatatttctcactcttcggatgaacggtcaccacgccgacgtgtgcgccctgactcgcgcgatagataacctcgacctcgccggtatggatattcacacgctcaatggtctcgccggtaaagctcgcgccagaaggacgcacgtcaaataccagccactggctgtcgggcgtccaggtattggtattggtgagcaggtgattacggggagcaaaggttatctgtttcatggcgcggtcctgatacaaaacgggtcccgccatcatacttcacaaggacttcactttcagacaatagtcttttgccatcgtgatgaatgtgagtgaaaagatggaacatttcgacgtggcgattattggcctcggcccggcaggaagcgcgttggcacgaaagttagcaggcaaaatgcaggtgatcgcgctggataaaaagcaccagtgtggtactgaaggtttcagcaaaccctgcggcggtctgctggcaccggacgcgcagcgatcttttattcgcgatgggctgacgcttcctgtcgatgtgatcgctaatccgcagattttcagcgtcaaaaccgtcgacgtcgccgcaagcctcacgcgtaactaccagcgaagctatatcaatattaatcgccatgctttcgacttgtggatgaaaagcctgatccccgccagcgttgaggtttatcacgacagcctgtgccgaaaaatctggcgtgaggatgataaatggcatgtcatttttcgtgcagacggctgggagcaacatattaccgcccgctatctggtcggtgccgatggcgcaaacagcatggtgcggcgacatctctacccggatcatcaaatccgtaaatatgtcgctatccagcagtggttcgcggagaaacatccggtgccgttctactcctgcatctttgataatagcataactaactgttatagttggagtatcagcaaagacggttattttatctttggcggtgcctatccaatgaaagacggtcagacgcgtttcacgacgctgaaagagaaaatgagcgcctttcagttccagtttggtaagacggtgaaaagcgaaaaatgcacggtgctgtttcccagccgctggcaggattttgtctgcggtaaggacaacgcctttctgattggtgaagcggcgggatttatcagcgccagcagcctggaggggattagctatgcgctggatagcacagacattctgcgtagcgtgttactgaagcagccagagaagctcaataccgcttactggcgcgccacccgcaaactgcgtttaaaactcttcggcaagatagtaaaaagccgatgcctgaccgcaccggctttaagaaagtggattatgcgcagtggtgtggcacatattccacagttgaaggattaaccaacgcgcttcacatcgcccaccagcaggatataagagagcgcgccaatcaacgcgacggcggagatataaaccagtgcaggtgcgaaaccgtaaccctgcgccaggtaccccaccaccagcggaacggtgatgccgcccagaccaccggcgaagttaaacacgccgccggttaaaccaatcaggcgcatcggtgccagagaagaaaccaggctccaggtaatgctagcaaaaccgttaccgaagaatgccagcgccatcaggcacataatcatcatcggatcgttagtgtagttagcgcccataatgcaggtggagatcagcaagccgcagataatcggcgttttacgcgcaaagcccagactaaagcccttacgtaccagcagatccgctacccagccagagagcaggacgccgacaaacgccgcgaggaatggcaccgtggtcataaagcctgctttcagcgccgtgattcctttttcctgggttaaatagttcgggaaccaggttaagaaaaaccacagtgtagaagccaccgcaaattgcccaagataaacgccgatcagtttacgatggaacaccagtttccagtctttggctgttaacggctgacgcgcctctttcttcaccggcgcatcaccatccaccagaccgccgccatcacgaatgtaatccagttcagctttgctgatacctttggtcaggcgcggcggctgataaaccttaaaccaaatcaggctccagataatgccgataccaccagtgacaatgaacacccagtgccagctcaacatctcctgaatccagatcagcagcggcgtcagaaacgccagaccgacaaactgaccagacgtataaaaaccaacggcagaagcgcgttcatgttccgggaaccagctggtcaccatccggttattggtcgggaaagcaggcgcttcgaaaataccggttatcgcgcgcagaccaattaaactcattaagcccgtggcaaagccctggaataaagtcgccacactccagccaaatatcgcaataaaataagtcacgcgagaacctacgcgatctaaaaaccaaccgccggggatctgacatagcgtataaagccaggcgaaggcgctaaatacatagcccatttccgctttggtaatgccgaactcttcctgaatatgggcggaagccacggccaggttggcgcggtcgacataacaaatgactaccgtaataaagatcatcaccagcgtcagataacgccgacgccccggctttgctgcattaacgggaatatccatagcgagctttctccagattttgggcatagcgaagccgctcaccatgccctgtaatttacagagggttatatttttgtattgctgttttagtgcccgatgaggggcttacgtggcaggaattaccactctgctacgctgttatcttcatgacgccagagcggattacgccagtccggggcatttttactgaactcaatcactttagcttcgtcgatttccacgcctaagcccggtttcgttaacggtttaaagaagccgccgaccatgctgaagtcttctttgtttttcacaaagtcgagtaactccgcgcctttgttgtaatgaattcccatactttgttcctgaagtacggcgttataggaaacaaagtcgatatgcaggcaagccgccagtgcaatcggtccgagcggacagtgcggcgcaagggtcacgtcataggcttctgccattccggcgattttgtagcattcggtaataccgcccgcgtgggagagatccggttgcagaatgctaataccacctgcctccagcacgcgtttaaaatcgaagcgactgaacatgcgttcacccgccgccagtggaatatgcgtttgtgccgccagtttcgggtagtattcggcttgttccgccagcaccggctcctcaataaacagcgggcgatacggctccagttctttaatcagcactttcgccatcggcgcgctgacgcgaccgtggaaatcaagaccaaactcaatctgattgccaaaagcttcacgaatttgtgccacggtgttaaccgccgcatctaccgcgcgggagttatcaattagccccagttcttcacaaccgttcagtttgaaggtatcgaagccgatttcgcgtagcgttttaatgccgtcgataacatccgccggacgatcgccgccaacccaactgtaggctttaattttgtcgcgaaccaggccgcccatcagttgccagaccggcgcattcagcactttacctttgatatcccataacgcctggtcaatcccggcgatggcgctcatcaggatcggaccgccgcgatagaatccggcgcgatacatcacttgccataagtcattgatgcggcttggatcctgaccaatcaaatagtcacccagctcgtgaactgccgcttccaccgtacgggcgcggccttcgatcacgggctcgccccaaccgaccacgccttcatcggtttcaattttcaggaacatccagcggggaggtaaacgatacgtggtaattttggtgattttcattgcactgcctctcgatacgccttaacaaatgctgctgcctgctgcgcggtgcgctctacggattgcccggcgcgatagagatcgctgcctaagcccgcccctgcacaacctgcgtctatccactgcgccaggttttctggcgtcacgccgccaacggcaaagactgcgatgtcgcttggcaataccgcttttaacgctttgatgtattgcggaccaaaagcgctactcggaaatattttcagcgcctgcgcgcccgcttcgagcgcggtaaaggcttcggtcgccgtcgcgcagccggggcagacggtcatgccgtagcccaccgcacggcggatcacttcactatggatattgggcgtaacgatgagctgacagcccatcctggcgagcgcatcgacctgttcaggtttcagtaccgtacctgcgccaatcaacgccttgtcgccgtacgcatcaacgatggcgggaatgctttgctcccattgtggggaattcagcgggatttcaaccgcgtcgaacccggcgtcaatcaccgcgccaacatgcgccagcgcctcgtcgggcgtaataccgcgcaaaatggcgatcagcgggagtttagtttgccactgcatgagcgatgctccttataccagcctgaaatgccgtgtcgcccgccaccgccgtcacgtcgcaacccatcgcctgaaaggcttgctggtagcgcgcggtcaggcttgttccggcgacaagggtgatggcgtgttgatgggccacatagtcgcgcatactggcgacctctgcgccaatcaacaaaccagagagaaattcgctgacctgttcgcggggaagtgttcccagcacatggctggcgcgaacttcaaaaagctgcggcaatatggcgggcgtattaagaccacgctcaaggccagctgtgaaggcatcggcagagttttcctgcggcggcaaacctgcgccaatcaaactgtgatttaacagtaaatgatgtaattcaccggtcatcacggtgcgaaaatcgttgatttgctggctatcggcctgcacccatttgcaatgggttccgggcatgacataaagagaggaaggagccagagctcgcgcgccgatcaattgtgtttcttcgccgcgcatcacattgtggttatcgtcatgagagacacataatccgggaataatccagatattgtcgccaacactcgttaattgttcgccaatagagctaaaacaggcaggaacagataaatacggtgcaactttccagccgacgttgctgccaaccattcctgccattaccactggcgttttctcttcacgccagtcggtcgtgacttctgctaacaccgcagccggagattttccgttcaggcgcgtgacgcctgcttcactttgcctgctctccaggcagtggtcgccctgataaagccaggcgcgcagattggtgcttccccagtcaattgcgatgtagcgagctgtcatgtgatttcctttaaccttcgtgtgctgctggcgatcatggtaagcgccgcctgctctgccgcatcgccgtcctgatgtcgtatcgcatcgaacagcgccttatgttcctggagcgtttgcggcatgttggcctcatcgcccatccaggttcgttcaaaaaccgcccgctgcaggctactgatcgcaatgctaagttgctgtaacaccgggttatgcacgctctgcagcaccgcctcgtggtagcgaatatccgcttcgttaaacgcttcgcggtcctgattgttggcaatcatctcgttcagcgcgctttcaatctgcgccagatcgctggaagtcgcgcgctctgctgcccaacgggcaatcgccggttccaccagatttcgcacttcgctcatggcactgataagccgtgggtcgtagtcattttccagcacccattgcagtacgtcagtgtcgaggtaattccactggttacgcggtgccacaaacgccccgcgataacgtttcatttcaatcagccgcttcgccatcaggctacggaacacctcacggatgatgttgcggctggttgcaaactcctcacagagttccgcctcagccggaagcgggctgcctggcacgtatttgccgtgaacgatctgtttacccagcgtaatgacaatgcgatcggttttattgagagtcatggagagtccttgtgctctgtatgttcttctctactttaccccgatcgatgcataacgcggcaactttgtagtaccagcgtgatgacgttcgcgtttgccgtgcgtgtaatgtagtacaaacttatattgttgtactacaatttagatcacaaaaagaacaatgcataaaaaaatgacatgcgtcgggcagaaatctgaaaagggatatcaggcgctaaacaggagggaaagaagagtatgctttcaacggcttagctactcgtttaaaggattaatcatgaagttgaattttaagggattttttaaggctgccggtttattcccactggcgctgatgcttagtggctgtatcagctatgctctggtttcccataccgcaaagggtagtagtggaaagtatcaaagccagagtgacaccatcactgggctaagccaggcaaaagatagtaatggaacaaaaggctatgtttttgtaggggaaagcctggattaccttatcactgatggtgccgatgacatcgttaagatgctcaatgatccagcacttaaccggcacaatattcaggttgccgatgacgcaagatttgttttaaatgcggggaaaaagaaatttaccggcacaataagcctttactactactggaataacgaagaagaaaaggcactggcaacgcattatggttttgcctgtggtgttcaacactgtaccaggagtctggaaaacctaaaaggcacaatccatgagaaaaataaaaacatggattacagtaaggtgatggcgttctaccatccatttaaagtgcgattttatgaatactatagtcccagaggcattccggatggtgtttccgcagcattactgccagtgactgttacgctggacatcattactgcaccgctgcaatttctggttgtatatgcagtaaaccaataatcagtaagcgggcaaacgcgtttatgctgtttgcccgcccacagattaattcagcacatacttctcaatagcaaacgccacgccatcttcaaggttagatttggtgacaaagttcgccacttctttcacactaggaatagcgttatccatcgccacaccgacgcctgcatattcaatcattgcgatatcgttttcctgatcgccaatcgccatgatttcttccggtttaatacctaacacgtcggccagacttttcacccccgtacctttgttaacgcgtttatcgaggatttcgaggaagtacggcgcacttttcagcacggtatatttctctttcacttcctgcggaatacgcgcgatagcctggtcgaggatggcgggttcatcaatcatcatcactttcaggaactgggtattggggtccattttctccgcttcgcagaacaccagcggaatggtggcaacgaaggattcatgcaccgtgtagtagctgatatcacggttggcggtgtacagcgtggtgcggtccagggcgtggaaatgagaaccgacttcgcgagagagtttttccaggaaacgatagtcgtcatagctgagagcagtttgcgccacggtgctaccatcagcggccttctgtaccagcgcgccgttataagtaatgcagtagtcgcccggctgttccatatgcagctctttcaggtagttgtgcacacctgcatacgggcgacccgtcgttagcacgacattcacgccacgggcgcgagctgcggcaatcgcatttttaacggcgggactaatggtgtgatcgggcagcagaagggtgccatccatatcgatagcaatgagtttaatagccatgagttccccaggtagattggttcctgacccatgctaacgcgattccgctcaaaaatcagtacaacacccgagggaaaagggggatgcaacgcgcgttgcgtgctccctttttgcttagcggaagagtttccctttcagcagttccatgcctgcggaaagcagatcgttattggcttgtggactcacttcaccttgcggactgagcgcatcaataatcttcggcaattgttctgccagtaaactggaagctgtactggtatccacgccaagtttttgcccgagatcggacaccgcatttgtgccgagcgcgctttccagttgctcgccactaacgctttgattgccctgttgattactcagccaggtactgagaatggcccctaagccgccactttgcagtttttccagcagcacctgaatgccgccctgctcctcaacccaacttaaaatagcctgatatttccccgcatcgcctttcagaaaggcaccgacaacttcatcaaaaagccccatgataatcacctgtaaagcgttacgtgttgacccaaaaagtatagatttgcgggatgataattgcggattgcagaaataaaaagggcggagatgatctccgcccttttcttatagcttcttgccggatgcggcgtgaacgccttatccggcctacaaaatcatgaaaattcaatacattgcaagattttcgtaggcctgataagcgtagcgcatcaggcacgctcgcatggttagcgccattaaatatcgatattcgccgctttcagggcgttctcttcaataaacgcacggcgcggttcaacggcgtcgcccatcagcgtggtgaacaactggtcggcagcaatcgcatctttaacggtaacgcgcagcatacgacgactttccgggtccatagtggtttcccacagctgttccgggttcatctcgcccagacctttataacgctggatggagaggccgcgacgggactctttcaccagccagtccagcgcctgctcgaagctggctaccggctgacgacgctcgccacgttcgataaacgcatcttcttccagcaagccacgcagtttctcacccagcgtgcagatacgacgatattcgccaccggtgataaactcgtgatccagcggatagtcagtatccacaccgtgggtacgcacgcgaacaatcggctcgaacaggttttgctcagcattggtgtgaacatcaaacttccactggctgccgtgctgttctttgtcgttcagttcgctgaccagcgcgttcacccagcgggtaacggtctgctcatcagaaaggtcagcttccgtcaacgtcggctgatagataagctctttcagcattgctttcggataacgacgctccatacgattgatcattttctgcgtcgcgttgtactcagataccagtttctctaacgcttcgccagccaatgccggtgcactggcgttggtgtgcagcgttgcgccgtccagcgcgatagagatctggtactgatccatcgcttcgtcgtctttaatgtactgttcctgcttgcctttcttcactttgtacagcggcggctgagcgatgtagacgtgaccgcgttcaacgatttccggcatctgacgatagaagaaggtcaacagcagcgtacgaatgtggctgccgtcgacgtccgcatcggtcatgatgatgatgctgtgataacgcagtttgtccgggttgtactcgtcacgaccgataccacagccaagcgcggtgataagcgtcgccacttcctgagaagagagcatcttatcgaagcgcgctttctcgacgttgaggattttacccttcagcggcagaatcgcctggttcttgcggttacgcccctgcttcgcagagccgcccgcggagtccccttccaccaggtacagttcggaaagcgccggatcgcgttcctggcagtctgccagtttgcccggcaggcccgctaagtcgagcgcacctttacggcgggtcatttcacgcgcgcgacgcgccgcttcacgggcacgggcagcatcgataattttgccaaccacgattttcgcgtcggttgggttttccagcaggtattctgccagcagttcgttcatctgctgttcaaccgcgcttttcacctcagaagaaaccagtttgtctttggtctgggaggagaatttcgggtccggcactttcacggaaacgaccgcaatcaggccttcacgcgcatcgtcaccggtggcgctgactttggcttttttgctgtagccttctttgtccatgtaggcgttcagggtacgggtcatcgccgcacggaagcctgccaggtgagtaccgccgtcacgctgcggaatgttgttggtaaagcagtagatgttttcctggaagccatcgttccactgcaacgccacttcgacgccaataccgtctttttcagtggagaagtagaagatattcgggtggatcggcgttttgttcttgttcagatattcaacgaacgccttgatgccgccttcatagtggaagtggtcttctttgccgtcgcgcttgtcgcgcagacgaatggaaacgccggagttgaggaagctcaactcacgcagacgtttcgccagaatttcatattcgaactcggtcacattggtgaaggtttcgaggctgggccagaaacgcaccatggtgccggttttttcagtctcgccggtaaccgccagcggggcctgcggtacaccgtgttcgtagatctgacggtgaattttaccctcgcgctggataaccagctccagtttttggctcagggcgtttactacgctaacaccaacgccgtgcagaccgccggacactttataggagttatcgtcaaatttaccgcctgcgtgcagaacggtcatgatcacttccgccgcgcttacgccctcttccgggtgaataccggtcggaatgccgcgcccgtcatcctgtacagagacagagttatcggcgtgaatggtgacgataatttctttacagtgacccgcgagcgcttcgtcgatagcgttatctaccacctcgaataccatgtggtgcagaccggtgccgtcatccgtgtcgccgatatacatacccgggcgcttacgcaccgcatccagccctttcaggactttgatactggaggagtcataagaattgctcatcaacgtttctcgctcatttatacttgggttaatccgttattttacccttttccacggtaaacatcttgctattttcgtcgctcatgtctataacgtgttcagcactgatcgcgctgacaaagacctgactttgcgtcgcttttaagcggctggcaagcagcccgcgacgctcatcatcaagctcagaggcaaaatcatctatcaggtagagacaccgccgcccgctttcacgggtgaggaactctccttgcgccagacgtaaggcgcacatcaacagcttaagctgcccacggcttaaggtatcttccaccggcgcaccgtcggcgcgaatgcgtaagtccgctttgtgcgggccgtgcgcggtgtaggttagctggcgatcgcgttcaaaattacgttccagcacctcagcatattctgtctctttctcccagccgcgctggaaagagaaagtcagagaaaactcagggagaaattgcttacaggtatcagccatatcggccgcgataccggcgctatactccgcgcgccaggtgctgatttgctccgccagcgggatcagctctttatcccacgggcgtagctgttcgtaacgtgtcacctggcgcagcgccgcattgcgctgcttgagcaatcgcttgagattgctccaggcggtgaaaaatccgggttcgttgtgaaagcatccccagtcgaggaatgctcttctgtatttggggccgccgttgagtaaagtaaacccttctggcgttatcaactgcattggcatcaggtgcgccagttccgcgaccttatgcccgtctgtaccgtcgatgcggactttgctgtcgccctgtttgtctttggttaagccaatcgctgtctcgcgctcttcgccctgtaatcgcccgtggagaacaaacgcctcctgctcatggcgaatgacgcgaccaatctgcaaactgcgaaacgcccgaccatggccgagcgtatagatggcttccagcacgctggttttgccactgccgttggcacctaccagaaagttaaagccgggagataaggcgagatccgcggtttcaatgttgcggaaatcgcggatcaacaagcgggtgagggacattacagtctcattggcatgacaacataagccgcgctctggctggccgcatcttcaatctgcacgctggaaacgctatcggtcagcatcatgcggacgttttcgcatttcagcgcgttcagaacatccagcacataactgacgttgaagccgatttccatctccgcaccgctataggtaacgtcgaggatctcttccgcttcttcctgttccgggttgttggcggtgattttcagctggttttcgctgacataaagacgtacgccgcggaatttctcgttagagagaatcgccgcgcgagcaaacgcctgcttgagcagatcgcagccagcttccagatgtttgtccgggttcttcggcagaacgcggcgataatccgggaagcgaccatccaccagtttggaggtgaagataaagtcgccaacgtgggcgcgaatgttgttgctgccaatctgtacgcgcagcggattgtcgccgccgtcgagcatacgcatcagttcaatcacgcctttacgcggtacgatcacgctatggcttggcaaagattgaccaattggcatactacagaccgccagacggtggccgtcggttgccacggtgcgcagttcttcaccttcggtttcaaacagcataccatttaagtaatagcgaacgtcctgatgcgccatagaaaactgggtcgcttcaatcagacgcttcatcgttgcctgcggcagggtaaattcgacttcactctgccagtcatcgaggttcgggaaatccgccgctggcagggtagacaggctaaaacggctacgcccggagcgtaccagcatccgttcaccttccagctgcacggcaatttccgcgccttcaggcagaccacggcagatatcaaagaatttgcgcgccggaacggtcgtcgctcctggctcgtgtggctgaaccagcgcaacacgtgccaccatttccatctcgagatcagtaccggtcaggctcaacgtaccgtcagcaacctgtaacagcagattaccgagaatcggtagcgtaggacgaccacctaacggaccgctcacctgttgtagcggttttaataaatgctcacgttctacggtaaatttcataggtttagctactcaatgttctgattaaattactaaaatcttctttgatatcgtggctctcttcacgcaactgctcgatcttacggcaggcatgaagcaccgtcgtgtggtcacggccaccaaacgcatcgccaatctccggcagactgtggttagtcagctctttcgccagcgccatcgccatctggcgcggacgcgccacgctgcgggatcgacgcttggaaaggagatccgcgactttgatcttgtagtactccgccaccgtcttctgaatattgtcgatggtgaccagtttttcctgcaatgccagcaagtcgcgcagcgcctcacgcacgaagtcgatggtgatcgcccgtccggtaaagttggcattggcaatgacgcggttcagcgccccttccagctcacgtacgttagatcgtagacgcttggcgataaagaacgccacttcgcccggcaaacgaatgtcgttttcgtcggcctttttcatcaggatcgccacacgggtttccagctctggcggttcgatcgccacagtcagtccccaaccgaagcgggatttcaaacgatcctcaacgccgttgatctctttcggatagcgatcgctggtgagaatgatctgttgattaccttccagcagggcgttgaaggtgtggaaaaactcttcctgagatcgttctttattagcaaaaaactgaatatcgtcgatcagcagtgcatctacggaacggtagtagcgtttaaactcttcgatcgcgttgttttgcagggctttaaccatgtcctgaacaaagcgctcggagtgcatataaaccactttggcattcggcttgcgcgccataatgccgttacccaccgcatgcagcaggtgagttttacccagacccgtgccgccataaaggaacaacgggttataggcaccgccagggttatccgccacctggcgagccgccgcgcgcgccagttggttagatttaccttcaacgaagttatcaaacgtgtgtttgacgtttacgttagaacgataggtcggttctgccggggccgggacgttatcccaaccactgcgcgtagaaggcgcagcacgttgcggctgcgtttgcgccacctgtgcaggggccgcgacgttgctcgtcactgccgcttgtggcgtttgcgtcaccggtttggtgccgacttcaaaacgcagctgtggggcatccgctccgcagaaactggttagcagtccattgatattattaaggtacttgtcccgtacccaatcgaggacaaaacggtttggcgcgtacagggccagcgtgttatcgctcagttccgcctgcaatgggcgtatccacatactgaattctgtggctggtaactcatcctgcaatcgggcaagacactgctgccaaaggctaagactcacggcggactccactcgaacaaaagtcgataatgactaaggctgaaacattcatgattgttgacgtacgtcgaaaagaccctgcttgagggtgacgcacgaaccgctgtctgcggttatatgcccgatcaagatcctgcaaaacgatcgggaccgcggatcatagcctaaactgcgcaagagatcttctgtttctcacagattttcccgatttatccacaggactttccagaactcgctaagtgtaaacgatcctgccgcgaggcgggcacgatttacgccgcatattggaaaatttaatgaccatagacaaaaattggcttaatcgatctaataaagatccaggacgatccttgcgctttacccatcagcccgtataatcctccacccggcgcgccatgctggtttccactggtgtgaggtcgtacattttccctgcgaaaaggtgcggaaaagcgcggtaaataaggaaagagaattgactccggagtgtacaattattacaatccggcctctttaatcacccatggcttcggtgtccatcgtttcatttttcggcggatatccaataaagccattgaatttattcaagtttaggtagaaatcgccatgaaacgcacttttcaaccgtctgtactgaagcgcaaccgttctcacggcttccgtgctcgtatggctactaaaaatggtcgtcaggttctggcacgtcgtcgtgctaaaggccgcgctcgtctgaccgtttctaagtaataaagctaacccctgagtggttaagctcgcatttcccagggagttacgcttgttaactcccagtcaattcacattcgtcttccagcagccacaacgggctggcacgccgcaaattaccattctcggccgcctgaatagcctggggcatccccgtatcggtcttacagtcgccaagaaaaacgttcgacgcgcccatgaacgcaatcggattaaacgtctgacgcgtgaaagcttccgtctgcgccaacatgaactcccggctatggatttcgtggtggtggcgaaaaaaggggttgccgacctcgataaccgtgctctcagcgaagcgttggaaaaattatggcgccgccactgtcgcctggctcgcgggtcctgacttaatcggaagcgttggaaaaattatggcgccgccactgagccctggcagccgggtcctgatagccctcattcgggtctatcaacgcctgattagtccgctactcgggccgcattgtcgtttcactccaacctgtagtagctacggaattgaggcattgcgcaggtttggagtgataaaaggcagttggttgacggtgaaacgcgtattaaaatgccaccctttacaccctggtggtgacgatcccgtcccgcccggaccatttgataccagagaacactaacgatggatagccaacgcaatcttttagtcatcgctttgctgttcgtgtctttcatgatctggcaagcctgggagcaggataaaaacccgcaacctcaggcccaacagaccacgcagacaacgaccaccgcagcgggtagcgccgccgaccagggcgtaccggccagtggccaggggaaactgatcagcgttaagaccgacgtgcttgatctgaccatcaacacccgtggtggtgatgttgagcaagctctgctgcctgcttacccgaaagagctgaactctacccagccgttccagctgttggaaactagtccgcagtttatttatcaggcacagagcggtctgaccggtcgtgatggcccggataacccggctaacggcccgcgtccgctgtataacgttgaaaaagacgcttatgtgctggctgaaggtcaaaacgaactgcaggtgccgatgacgtataccgacgcggcaggcaacacgtttaccaaaacgtttgtcctgaaacgtggtgattacgctgtcaacgtcaactacaacgtgcagaacgctggcgagaaaccgctggaaatctccagctttggtcagttgaagcaatccatcactctgccaccgcatctcgataccggaagcagcaacttcgcactgcacaccttccgtggcgcggcgtactccacgcctgacgagaagtatgagaaatacaagttcgataccattgccgataacgaaaacctgaacatctctagcaaaggtggttgggtggcgatgctgcaacagtatttcgcgacggcgtggatcccgcataacgacggtaccaacaacttctataccgctaatctgggtaacggcatcgccgctatcggctataaatctcagccggtactggttcagcctggtcagactggcgcgatgaacagcaccctgtgggttggcccggaaatccaggacaaaatggcagctgttgctccgcacctggatctgaccgttgattacggttggttgtggttcatctctcagccgctgttcaaactgctgaaatggatccatagctttgtgggtaactggggcttctccattatcatcatcacctttatcgttcgtggcatcatgtacccgctgaccaaagcgcagtacacctccatggcgaagatgcgtatgttgcagccgaagattcaggcaatgcgtgagcgtctgggcgatgacaaacagcgtatcagccaggaaatgatggcgctgtacaaagctgagaaggttaacccgctgggcggctgcttcccgctgctgatccagatgccaatcttcctggcgttgtactacatgctgatgggttccgttgaactgcgtcaggcaccgtttgcactgtggatccacgacctgagcgcacaggacccgtactacatcctgccgatcctgatgggcgtaacgatgttcttcattcagaagatgagcccgaccacagtgaccgacccgatgcagcagaagatcatgacctttatgccggtcatcttcaccgtgttcttcctgtggttcccgagtggtctggtgctgtactatatcgtcagcaacctggtaaccattattcagcagcagctgatttaccgtggtctggaaaaacgtggcctgcatagccgcgagaagaaaaaatcctgattcggtgagttttcgctaaaataagggcggtcagttgaccgccttttttcttttcgtagggcggataagcaccgcgcatccgccacacaaagcaacaggaacatcatgagcgataatgacactatcgtagcccaggccacgcctccgggacgtggcggcgttggcatcctgcgcatctccggcttcaaagcccgtgaagttgccgaaaccgtgctgggtaaactgcctaagccgcgctacgccgattatcttccgtttaaagacgccgacggcagcgtgctcgatcaggggattgcgctatggttccctggcccgaacagcttcaccggcgaagatgtgctggaactgcaaggtcatggcggtccggtgatcctcgacctgctgttaaaacgcattctgaccattcccggcctgcggattgctcgccctggtgagttttccgaacgcgcgtttcttaacgataaacttgacttagcccaggccgaggcgattgccgatcttatcgacgccagtagcgaacaggcggcccgtagcgcacttaacagcctgcaaggcgcattctccgcacgggttaatcatctggtagaagccctcacccacttgcgcatttacgtcgaagcggcaattgatttccccgatgaagagatcgatttcctctccgacggaaaaattgaagcccagctcaatgacgttattgccgatcttgatgcagtgcgtgctgaagcacgtcagggtagtttgttgcgcgaagggatgaaagtggtgattgccggacgtcctaacgccggtaaaagcagcctgttaaacgcgctggcggggcgtgaagcggcaatcgtaaccgatatcgccggaactacgcgtgacgtgctgcgtgagcatatccacattgacggaatgccgctgcatatcatcgataccgccgggctacgtgaagccagtgacgaagtagaacgtattggtatcgagcgcgcgtggcaggaaattgaacaggccgaccgcgtgctgtttatggtcgatggcaccacaacagacgccgtggatccggcagagatctggccggaatttattgcccgtctgccagcgaaactgccgatcaccgtggtgcgcaataaagccgatatcaccggcgaaacgctgggaatgagtgaagtgaacggtcacgcgttaattcgtctcagcgcaaggactggtgaaggcgtggacgtgctgcgtaaccatctcaaacagagcatgggctttgacaccaacatggaaggcggcttcctggcgcgtcgtcgccacctacaggcgctggaacaggcagcggaacatctacaacagggcaaagcgcaactgttgggagcctgggcaggtgaactgctggcggaagagttgcgtctggcacagcagaacttaagcgaaatcaccggggaatttactagtgacgacctgctggggcggattttctccagcttctgtattggtaagtaaccgcgcttacgaggccgcattctgactgtcagatgcggcttcgcttcattgttaccactcctgttattcctcaaccctttttttaaacattaaaattcttacgtaatttataatctttaaaaaaagcatttaatattgctccccgaacgattgtgattcgattcacatttaaacaatttcagaatagacaaaaactctgagtgtaataatgtagcctcgtgtcttgcgaggataagtgcattatgaatatcttacatatatgtgtgaccagtaaatggttcaatattgacaacaaaattgtcgatcaccgcccttgatttgcccttctgtagccatcaccagagccaaaccgattagattcaatgtgatctatttgtttgctatatcttaattttgccttttgcaaaggtcatctctcgtttatttacttgttttagtaaatgatggtgcttgcatatatatctggcgaattaatcggtatagcagatgtaatattcacagggatcactgtaattaaaataaatgaaggattatgtaatggaaaactttaaacatctccctgaaccgttccgcattcgtgttattgagccagtaaaacgtaccactcgcgcttatcgtgaagaggcaattattaaatccggtatgaacccgttcctgctggatagcgaagatgtttttatcgatttactgaccgacagcggcaccggggcggtgacgcagagcatgcaggctgcgatgatgcgcggcgacgaagcctacagcggcagtcgtagctactatgcgttagccgagagtgtgaaaaatatctttggttatcaatacaccattccgactcaccagggccgtggcgcagagcaaatctatattccggtactgattaaaaaacgcgagcaggaaaaaggcctggatcgcagcaaaatggtggcgttctctaactatttctttgataccacgcagggccatagccagatcaacggctgtaccgtgcgtaacgtctatatcaaagaagccttcgatacgggcgtgcgttacgactttaaaggcaactttgaccttgagggattagaacgcggtattgaagaagttggtccgaataacgtgccgtatatcgttgcaaccatcaccagtaactctgcaggtggtcagccggttagtctggcaaacttaaaagcgatgtacagcatcgcgaagaaatacgatattccggtggtaatggactccgcgcgctttgctgaaaacgcctatttcatcaagcagcgtgaagcagaatacaaagactggaccatcgagcagatcacccgcgaaacctacaaatatgccgatatgctggcgatgtccgccaagaaagatgcgatggtgccgatgggcggcctgctgtgcatgaaagacgacagcttctttgatgtgtacaccgagtgcagaaccctttgcgtggtgcaggaaggcttcccgacatatggcggcctggaaggcggcgcgatggagcgtctggcggtaggtctgtatgacggcatgaatctcgactggctggcttatcgtatcgcgcaggtacagtatctggtcgatggtctggaagagattggcgttgtctgccagcaggcgggcggtcacgcggcattcgttgatgccggtaaactgttgccgcatatcccggcagaccagttcccggcacaggcgctggcctgcgagctgtataaagtcgccggtatccgtgcggtagaaattggctctttcctgttaggccgcgatccgaaaaccggtaaacaactgccatgcccggctgaactgctgcgtttaaccattccgcgcgcaacatatactcaaacacatatggacttcattattgaagcctttaaacatgtgaaagagaacgcggcgaatattaaaggattaacctttacgtacgaaccgaaagtattgcgtcacttcaccgcaaaacttaaagaagtttaattaatactacagagtggctataaggatgttagccactctcttaccctacatcctcaataacaaaaatagccttcctctaaaggtggcatcatgactgatcaagctgaaaaaaagcactctgcattttggggtgttatggttatagcaggtacagtaattggtggaggtatgtttgctttacctgttgatcttgccggtgcctggtttttctggggtgcctttatccttatcattgcctggtttagtatgcttcattccgggttattgttattagaagcaaatttaaattatcccgtcggctccagttttaacaccatcaccaaagatttaatcggtaacacctggaacattatcagcggtattaccgttgccttcgttctctatatcctcacttatgcctatatctctgctaatggtgcgatcattagtgaaacgataagtatgaatttgggttatcacgctaatccacgtattgtcgggatctgcacagccattttcgttgccagcgtattgtggttaagtagcttagccgccagtcgtattaccagtttgttcctcgggctgaagattatctcctttgtgatcgtgtttggttcttttttcttccaggtcgattactccattctgcgcgacgccaccagctccactgcgggaacgtcttacttcccgtatatctttatggctttgccggtgtgtctggcgagttttggtttccacggcaatattcccagcctgattatttgctatggaaaacgcaaagataagttaatcaaaagcgtggtatttggtagcctgctggcgctggtgatttatctcttctggctctattgcaccatggggaatattccgcgagaaagctttaaggcgattatctccagtggcggcaacgttgatagcctggtgaaaagcttcctcggcaccaaacagcacggcattatcgagttttgcctgctggtgttctctaacttagctgttgccagtagcttctttggtgtcacgctggggttgttcgattatctggcggacctgtttaagattgataactcccacggcgggcgtttcaaaaccgtgctgttaaccttcctgccacctgcgttgttgtatctgatcttcccgaacggctttatttacgggatcggcggtgccgggctgtgcgccaccatctgggcggtcattattcccgcagtgcttgcaatcaaagctcgcaagaagtttcccaatcagatgttcacggtctggggcggcaatcttattccggcgattgtcattctctttggtataaccgtgattttgtgctggttcggcaacgtctttaacgtgttacctaaatttggctaaatccttcaagaagccagccattcgctggcttcttgcctctcaggaaatcacttatgtccaaatggcaactcgcctgatcctccttcaccacgtatgctttgcgtcaccttactatcaggacgctttagcccatgtcccgctttttgatttgtagttttgccctggttttactttatcccgccgggattgatatgtacctcgttggtttaccgcgcatcgccgccgatctcaatgccagcgaagcgcagttgcatattgcgttctccgtatatctggcggggatggcagctgcgatgttatttgccggtaaagtggccgatcgtagtgggagaaagccggtcgccatacccggcgcggcgctatttattattgccagcgtgttctgtagtctggctgaaaccagcacgttatttcttgcaggccgatttctacaggggttgggcgcaggctgttgttacgtagtggcgttcgctattttgcgcgacacgctggatgatcgacgtcgggctaaagtgctgagtttactcaacggtattacctgcatcattccggtgttagcgccagtgctcggacatctgattatgcttaaattcccgtggcagagtctgttctgggcgatggcaatgatgggcatcgcggtactgatgttgtctttgtttattttaaaagaaacgcgcccagcggcccccgcagctagcgataaaccacgagaaaatagcgagagcctgcttaaccgttttttcctcagccgtgttgttatcaccaccctcagcgttagcgtgatcctcactttcgtcaacacgagtccggtattgctgatggaaatcatggggtttgagcgcggtgaatacgccaccattatggcgctgaccgctggcgtcagcatgaccgttagtttctccacgccatttgcgctgggaatttttaagccacgtacgttgatgatcaccagccaggtgttattcctggcggcggggatcactcttgccgttagtccttcccatgcggtttctctgtttggtatcacgctgatttgcgccggtttcagcgtaggttttggtgtggcgatgagtcaggcgttagggccgtttagtttacgcgcgggcgtagccagcagcaccttaggtattgcgcaggtttgcggtagcagtctgtggatttggctggcagcggtggttggtatcggcgcatggaatatgctgatcgggattctgattgcctgtagcatagtgagcctgttgctgattatgttcgtcgcgcctggacgccccgttgccgctcatgaagaaatccatcaccacgcttgatctcaatctgctgctttgtctgcaactgctgatgcaggagcgcagcgtaaccaaagcggcgaagcggataaacgtgacacctagcgcggtgagtaagagcctggcaaagttaagagcgtggtttgacgacccgctctttgtgaacagtccgctgggtctgagccccacaccgctgatggtcagcatggagcaaaatctggcggagtggatgcaaatgagcaacctgctgctggataaaccgcaccaccagacaccgcgcggcctgaagtttgagctggcggcggaaagtccgctgatgatgatcatgcttaatgcgctgagcaaacagatctaccaacgttacccgcaggcgaccatcaaattacgtaactgggattacgattccttagatgccattactcgtggtgaagtggatatcggtttttccggtcgcgaaagccatcctcgcagccgggagctgttaagcagcctaccgttagccattgattatgaagtgctgtttagtgatgtgccctgcgtctggttacgcaaagatcatccggcactgcatcaaacgtggaatctggacaccttcttacgttatccgcatatcagcatttgctgggaacagagcgatacctgggcgctggacaatgtgttacaggagctgggacgcgaacgcacgattgctatgagcctgccggaattcgagcagagtctgtttatggcagcgcaacccgacaatctgctactggcgaccgcgccgcgctactgtcagtactacaatcaactccatcaactgccgttggttgctcttcctctcccgtttgacgaaagccagcaaaaaaagctggaagttccttttaccctgctgtggcataaacggaacagccataatccgaagatcgtctggttacgggaaaccattaaaaacctttacgcgagcatggcataaccgaatcgtatgaaacgcgacccaatttcacaataaaatgtaaaaaagttgtaataagcttgtctgaatcgaacttttagccgctttagtctgtccatcattccagtaaatgattactcttgtattcataatggaccattaagcatggagcgaaaaatggcgactcactttgcccgagggattttaacggaaggacatctgatttctgttcgtctcccctcccagtgtcatcaagaagcccgaaacattccccctcatcgtcaaagccgttttctggcgtccagaggtttactcgcagaactgatgttcatgctgtatggcattggcgaattgccggaaatcgtcaccctgccgaaaggtaaaccggttttcagtgataaaaatttgcctagcttttccatttcctatgccgggaatatggttggcgtggcgttaacaaccgaaggtgaatgtggcctcgatatggaactacagcgtgcgacgcgcgggtttcatagcccacacgcgcccgataaccacaccttttccagcaatgaaagcctatggatcagtaaacaaaacgatcctaacgaagcgcgggcgcagctcatcacgctgcgccgaagcgtgctaaaactaaccggtgatgttttgaatgacgatccgcgcgatctgcagctgctgcccattgccggacgcctgaaatgtgctcatgtaaatcatgtagaagcgttatgcgacgcggaagacgtgctggtgtggtccgtggcggtcacgcccacgattgaaaagctcagtgtctgggagttagatggcaaacacggctggaaaagcctgccggatattcacagccgcgccaacaatcctaccagccggatgatgcgttttgcccaactctctaccgtgaaggcttttagcccaaattgatagacaaccacaggagtcatcatgtctgaaaaattgcaggtggttacgttactggggagcctgcgcaaaggcagttttaatggcatggttgcacgtaccctgccgaaaattgctccggcgagcatggaagtcaatgcgttaccatccattgccgacattcccttgtatgacgctgacgtacagcaggaagaaggttttccagcaacggttgaagctctggcggaacagatccgtcaggctgacggtgtggtgatcgtcacgccggaatataactacagcgtaccgggtgggctgaaaaatgccatcgactggctttcccgcctgccggatcaaccgctggccggtaaaccggtattgattcagaccagcagtatgggcgtgattggcggcgcgcgctgtcagtatcacctgcgccagattctggttttcctcgatgcaatggtgatgaacaagccggaatttatgggcggcgtgattcagaacaaagttgatccgcaaaccggagaagtgattgatcagggtacgctggaccacctgaccgggcaattgaccgcatttggtgagtttattcagcgagttaagatctaaataaaaaacccgccagcaatcatgcatggcgggtttttaacgcgctatcgattttagtgagcgtcgataaagacaatcttcaggataaacagcagcgcaacgatgattacgcacgggcttagatcacgcagacgtccggtaccgattttcatcacgcagtaggagataaagcccagcgcgataccttcggtaatgctgaagctgaacggcatcatcacggcggtaataaacgccggaacagattcagtaagatcctgccagttcacgcgtgccagactggaagtcatcagcacgccaacgtaaatcagcgcaccagctgcagcgtagcctggcaccatccccgccagcgggctcagaaagataaccagcaggaacagcagaccaacaaccactgccgtcagaccggtacgaccgccaacgcttacgccggaagaggactcaatataagccgtaacggaagaagtaccgataaagctaccggtcacggaagagatactgtcgacatacagcgcctgcttcatgcgcgggaatttccccttctcatccgccagacctgctttatcggtcacgccaatcagcgtaccggaggagtcaaacaagttgaccaacatgaaagagaaaatcacccctgccagcccgaggttaaagctcccggctaaatctacatgacccacaactgtcattacgctcggcggcgcagaaacgatgccattgtagtgcacatcacccagcatccagcccagcagcgtcgtcaccacgatagaaaccagcaccgctgcgtgaatgttgcggctggccagaatagcaatgatgaagaagccgaggatacccagaagtacgctgtgagaagtcagattaccgatgctcaccagcgtttccgggttagcgacaatcacacctgcgtttttcagccccatcatgccaatgaacagaccgataccgctggtaatacccacacgcagactcaccggaatgttggctatcatccagtagcgaacgcggaaaatcgtcagtaacagcagacctatcgcgccccagaagattgcgcccatcccgacctgccacggcaagcccatcgcctgtacaacgacaaaagcgaagaacgcattcaggcccatagcgggtgccagtgcaactggcaggttagcaaacagtcccatcataatactgccgaatgcagcgatcagacaggtagtgacgaagacggcgctggtatccatgccagcaacgccaagaatttgcgggttaacaaaaacgatgtaaaccatcgtcaggaaggtggtaaaaccggcgatcacttcggtccgtgccgtcgtgccatgttcgcgcagtttaaacacgcgttccagcatcccctgaccagaagtctgggtggtatgttgatgactcattatctatttccgaacaaggagggaaaatccgtcgctatcgtataccaaaatgcgacaataggcgcgtttgtgagagacttttttattggatttacttatacggcaacgattgcgttgcgcaaatcggctctacgaaaacgttaaactgattaaaaaggaaaggcatgtcccggatagaagcggtatttttcgactgcgacggtacgctggtcgacagtgaagtcatttgctctcgcgcatatgtaacgatgtttcaggaatttggtattacgctcgatcctgaagaggtattcaaacgtttcaaaggtgtaaaactgtacgaaattatcgatattgtttcccttgaacatggtgttacgttagcgaaaacagaagctgaacacgtttaccgtgcagaagtcgctcggctgttcgatagtgaactggaagccatcgaaggggctggagcgctcctgagtgcgatcactgcgccaatgtgtgtggtatctaacggcccaaataacaaaatgcagcattctatgggcaagctgaatatgttgcactacttcccggataaactgttcagcggctacgatattcagcgctggaagccagacccggcgttaatgttccatgcggcaaaagcgatgaatgtaaatgtagaaaactgcattctggttgatgacagtgttgccggtgcacaatctggtatcgacgcaggtatggaagtgttctacttctgcgccgacccgcacaataagccgatcgttcacccgaaagtcaccacctttacccatcttagccagttacctgaactgtggaaagcgcgtggttgggatattacggcataattcttcacactcccttcacttaccccgcttaaattggcgctcaaaggtaagtaaagggagtttgatatgtctgttagtcgtcgggtaatacatcacggactttattttgcagttttaggaccgttaattggtgttctgtttcttgtcctctacatattcttcgcaaaagaaccgctggttctttgggtgataatacatccaatttttctcttattgagcataactacgggagctattcctgcgttgttaaccggtgtaatggttgcctgtctgccggaaaagatcgggagtcagaaacgttatcgttgtctggctggtggcataggtggcgtcgttatcaccgagatctattgtgcagttattgtacatattaagggcatggcttccagcgagttgtttgaaaacattctttctggtgacagtctcgttgtccgcatcattcctgcattgctggcaggtgtggtgatgagcagaatcattacccgtctacccggattggatattagttgtcctgaaacagactctttaagttaagcgggatactttatctttgggctactcaaaagcagacaggatgtttctatgactcaaaatatcaggccgttaccccaattcaaatatcatcccaagccactggaaacaggcgcatttgaacaggataaaaccgtagagtgcgattgctgtgaacaacagacgagtgtttattacagcggtcccttttattgcgttgatgaagttgaacatctctgtccgtggtgtattgcggacggttctgctgctgaaaagtttgcaggtagttttcaggatgatgccagcatagaaggtgttgaatttgagtatgatgaagaggacgaatttgccggtattaagaacacatatcctgatgaaatgctgaaagagttggttgaacgcacgccaggttatcatggatggcagcaggaattctggctcgcgcattgtggcgatttctgtgtttttatcggctatgtgggctggaatgatataaaagatcgcctcgatgaatttgccaaccttgaagaagattgtgagaatttcggtattagaaattctgatctagctaaatgcctgcaaaagggtggtcattgtcagggttatctcttccgctgtctccactgcggcaagctgagactgtggggtgattttagctaattatttaaataatgagaacaggccggagcgtaattcacacatccggccttatttcttaagcttaaccgagtgctaattctgcggcagcggctttatcagcgattaccatcaggctaggatgcagctgcaacacggaagctggaacatcttcggtaaccggaccttgcagaacatttttcagtgcctgcgctttacccgcgccgctgacaattatcagcaagtttttcgccgccatgatgcttttcggccccatcgtcacgtagctgtcaggcactaagctaaagtcgccgcccaactcgccatgcgccacaatatcaaccatctctccctggatcgggaactccacggtttgctcatggaaatgggtcgtattcggcaaattgccacaaaaatgaccatctgcacctaatcccagcaccaccaaatccagtccgccttcacgcgccagtttctgatcatgctcgcggtagttatcaatagtgagcttctggatattctcttctttgatccccgcaggggtgaaaaacagattacgcagattggtaatcgttacgccttctccctctttgccgcgaaatggaatttcatcaaaattatagaaatagcagttatcgtaccagggcttacctttaaccagggtggtgaggtattcatacatgcctttgggcgtgctaccggcggtaattgccaggttaacacgacgcgtcttgctcatataaccaagcagatggtgtgccgcgacacggctcatttcctggtaatcttcggtaatgattaatttcatcttaatgccttattttatttaaataatttctgtacaaaggctgcataggctggtcgccagacatccatttcatggttcagacccggatattcctggtaatcaaagttaatttttttctgctcaagctcagttttcagcccggcgatatccttgccggttacgacatctttatcccccacaaccacagtaaaattacgtagttgctggttgatagctgccggatcgttcagtcgggccgcgacaccttcatccggtacggttgtcgtggtaacaccactgaatgtggccagccagccaaagctttccagatgattcattccggaaaccagcgcctggtacccgccttgactaagccctgccagcgcgcggccatcggcatctttacggacattaaaacgcttgctaatcagcgggataatatcgttcatcagttcgcgatctgccgctttagcattcagcggataaaagactttacgtctttcctgaggcacgaaatcttcgggaataatgcccttcgcatcggtttctgtatccgggatcaccaccagcatcggtttaattttcccttcagcaagcaggttatccatgatttgcgggatacgcccctgatcgatagcggaacgtccggtatcaccaaagccgtgatagaaatagagcactggcaaaggctcgcccatgccggtgtatcctggcggggtccagacatacatctgacgttcagattgcaatgcgttggagtggtaagttatggcgatcaaatcaccatgcgcaacagaacgcgtatccagataactgcctggcaccagaatcatactggagttaacctggcgctgaggattagtcattgcggtgcctgtatcaatgctgcgtacaccatcaacattgaaaaaatactcgtacaggttgcctttcaggataggtgtgcgccagctccagactcctgcttcgtctttggtcatcgggtgaatattgtccggaaccggaacacccaccactacagagacattttttgccccaggggcaaagtagcgaaaggtcacgctgttatcggcattgacctgagtcacatactgtttcaccgggatagtgggtgccgggctggctggcatatccgctgctatggcccactgagcagaaataccgctggcaatagccagcgttaaagcagcaatttttatattcatcgtaatattcctttcattaagttccattaccaccagatttcagcctgggcaccgacagcaaactggtcgtctttattgtcttcaaaggtgaagccatccagttcgttttccagggctttgatatacgtggcgtagaaacgaatttccggacggctggtcaacatactggtattgactttaaaggtatggaagagcgtggttttataaccagactcattaaatttattactattcgcatctttgttttgctgggtgaaatagcccagttcaacacctgtctggttatattggtcccaaatataggccgggcgaacaaccgcacgaatagattcgaaatcagagtgggcgcctgtttcgtagctatatatatcgttaccgaaggagtaaacaatcgcgttagctacaatgaaatgatcgccaatataggcttcgccctggctagtcagacgtaccgctgttccgccggtgtgatcaccataataacgaccattaaaggtggtaaatggacttgcgccagcataacggccaaagttactggcgatagagttattcgcgaccaggaaggagaattcgttgaagccacctttatcaaatttctgcgttaaagatgtgccaaacatccaggtatctttccagtcataatacccgttattatcctgattatctttttcgcttgcgctttcgtttgccgtgacataacgaccacttaccattaaggtggctttatcccataacgggatatctttatagcgtaaatcaatggtattggtattaatctgctgtttgttttgcaggctgcgatcgtaatcatcgacatcttcgcgaaccagcgcgatatcaattttacccggaccgactttccagttttccagacctacacccgctgcggcatcagtacgctgcgttttccagtcaagcatctggatttcaattttcggcgcaccgtgtttacccacccagaaatcagcctctggcgcaaagggcaggaaacctttggtggtaacgtacatatcggagaactgcatatagttctcgccaccggcgttatcgccaaaccagccggtagagtactgctgaccaacgttaccatccatcatcacaacggcatcaacccgtttgccgttttcgttgtagacacgttgttttaactgcaaatcaaaccagccggagtattcgttaccaaagcggcccagagaaccaatcgcccaacttttaggactaccatgagaggcggtcccccaaccagaacggtaatagccgttgtaactaaagccaatttcatctttcacaaatttactgaaatctttcagagtcatggaagaataaatgctgcctgtctcactggcatttttctcttcatttttgaccagtacagcatcaggttttgcggcactactggtcgggaacggattggcggcatacccttgatcattcgtacttacgctacgattcaccgtcgctggcgtatactttttcttctcttcatctttatactttttgagttcgctttgcgtttctcttaacgccttttctaataactcaaggcgttgttccaccgttaaactttcagccaaactttgtgcagaaaaggctaacggtgccattaataagatggcagaggtaataagatttcgtctaaacataatatccctttatggtgcaaagaaagaattaacgcatcgcatccagactgttctgaatgcgacgataattaaggtgctttaatggttattttttttaaactcagcccccgcgtcttgatcacctctgcataccatccgaagcttttcttgcgtgttcttgtgaggcttccttcgccattatcatcacgatccacataaataaagccgtagcgcttagacatttgactatgagatgcactgactaaatcaattggcccccaactggtgtaccccataatatccacaccatcggcaatcgcttcatttacctgtaccaggtgatcgtttaaataggcaattcgataatcgtcctgtatgctaccatccgcttcaacgctgtcttttgcgcctaatccgttctcgacaataaataacggtttttgataacgatcccaaagcgtatttaacagaacccgtaatccaaccggatcaatttgccacccccactcactacttttcagatgcggattggggatcatattcagtatgttgccctgcgcatttttattaatgctttcgtcgtgggaaacacaaccagtcatgtaataactaaaagagatgaaatcgacggtatgttttaaatcttctgcgtcactttcagtcatctcaatggtgatattgtggtcgcggaagaaacgctgcatatagccgggatactggccacgcgcctgaacatcaccaaagaacatccagcgccggttctcttccatggcctgcaacatatcctgtggctggcaggtgagggggtaaaccagcccaccgagaagcatattgccgattttcgcttcggggagcaggctatgacaggctttaactgcccgcgcactggcaaccagttgatggtggatagcctgataaacttccgcctcgccactctcttctgccagccccacgcccgtgaatggcgcgtgtaagctcatgttgatttcattaaacgtcagccataacgccactttatgttggtagcgagtaaagaccgtgcgggcgtaatgctcgaagtgatcgatgaccgctcgattagcccaaccgccgtagtttttcaccagcccatatggcatttcgtaatgggataacgttaccagcggcttgatccccgcctgcgccatttcatcaaacagccgatcgtaaaacgctaaccccgcttcattcggttcgacttcgtcgccctgagggaaaattcgcgcccaggcaatggaaatacgcagacaggtgaagcccatctcggcaaataacgcgatatcttccgggtaacggtgataaaaatcgatggcgacatctttgatattctctttccccaggatgcgcggttccatttttcccattacgccatgaggctgtaaatcactggtgctgatccctttgccatcttcctgccaggcaccttccacctgattggcagctgttgcgccaccccaaagaaatgtttctggaaatgctttcataattaactccttttatcgttagcgaatgatggataacagcggttcacctgcgcttatctgcgccgtgccgtggggtaatacgtccgtaaaatcatcgctattactgattaataccggcgtcgtcagatcaaatccggcctcgcgaatagcagggatatcaaaagaaatcagccgatcgcctgtattgaccttgtcacccacgttgacgtgagcggaaaagaatttgccgtccagttttacggtgtcgataccgacatgaatcaggatctccacaccatcatcactctcaatgccaatggcgtgtaatgtggcgaacaagctagcaattcgacccgcaaccggagaacgcacttcaccaacgctgggcagaatggcaatacctttacccaacaggccactggcaaacgtggtatcagcgacgtgaatgagcggcacaatctctcccgtcatcggactacagataccgccctgctcaggtggtgtaataacctctggtgttttctcttgcggggcaccctgcgctggctgacgtttagcggtgatgaaatgaagcatcaccgtaccgacaaatgcgcaaccgatggcaatgacaccgccaataacgctggcccagacggtgaaatcaattcccgtactcgggatggtttgcatgaaggtgaaaatacttggcaaaccaaaggagtagactttcgtttgcgcgtagccaataatggtggccccccaaagccccactgatacaggcgataacaaaggggtacttacgcggcaggttgacgccatataccgctggttcggtgataccaaacagactcgtcaacgccgcacttcccgccaccacttttttctgcgcatcgcgttcgcagaggaagacgccgagcgccgccccgacctgcgccataatggcgggcattaacagcgggatcatggtgtcgtagcccagcacggtgaagttattgatacacagcggcaccaggccccagtgcagtccgaacatgacgaagatttgccagaagccgcccattaccgcgcccgcaaatgcaggaaccgcctgataaagccagagataaccggcggcaatcagttcgcttatccaggtacttagcggccccaccagcagaaaggtgacgggtgtgataaccatcagacatagcaatggtgtgaagaaatttttgattgcgctcggtaaccacgcattaagtcggcgttccagaatgctgcacaaccaggcagaaaaaataatgggaataacgctactgctgtaattcaacaatgtgaccggaatacccaggaaatccagccccagcgcatccgctttttgcccgttctcgaaagcagtcagaattaatggatgcactaacgctccaccaatcaccatggcagtaaatggattaccgccgaagcgtttccccgcggtgtatcccaggattatcgggaagaaccaaaacaaggcatcactggcgctgaataaaattaaataagtaccactttgttcggtcgtccactgaaaagtgagcgccagagccagcatacctttcaagatcccggttgccgccatcaaaccgatcagaggcgtaaaaataccactaataacataaacaaagcggtttagcagattacctttatcatcattttccggtgcctgttgcgctttttcgtcaaggcctgccacactgttaaccgccaggaagacatcggccacatggttacctatgaccacctgaaactggccaccgctttccaccaccataataataccgggggtctttttcagtacctctgcttgcgctttgctttcatcctttaatttaaaacgtaatcgcgttgcgcaatgcatcagactcacaatgttatctgcgcccccgactcctgcgactatttttctggctaactccgtcataacttgccctctaccgctttgcggcaaaactccaaaaaaaaacctgaaaaaaacggcctgacgtgaatcaagcaatttttttcaggttttgcccgcttagtgcggtaacaatcctttactcagtaataatatttcagtgttctttgcgcacgcgctctatatttatggctaaaaacataatctctgcgggactaattttacgttgatactgcaaaccaataaaaatggcgatccgttccgcacattgccatgcttgcgggtaattttgttttactgcttgttgtaaactttcatcactatcgttaatactagcatgttcaagaatacgccaggataaaaacttcagatgtgtaaccagtcgctgataactcaagctttcttcctggtaattaaggctgaactgaaattttattaattgcagcatttcgcgcattaactgcgtgacacctgcaacatcctccatatttccgctcatttgggcactgaccagatgcatggcaataaagcccacttcatctttcggtaactgcacgcccaaccgtttatcaataatggttaacgcttcttcccctagctggaactctttcgggtaaagccgctggatatcccacagcaacgggttgggcagcaacacgttttgctgaaagcgtttaatcgcaaactggcaatggtcagttaggctgatataaatactgtcctgtaattttcccaagcgctcctgcgctaaagagataatacgatcacaggttgccatcacctcaagaggaatatgacttaagagttcgcttaatcgcccgttcagttcatgactgctcaaggcatactctttttctattccactactgttaattctttcgccagcgcgtttttgaaagccaattccgcgccccatgacgactttttcccgctgttgatcatcaataaccaccacaacattattgttgagaattttggtgatttgcatgttcatagcaaggaccttttttataaacaaaaaaacccgacttcaccagtattctctggttatgtcaggttttgcctgcgaatgcagtaacaatccagtcatttattaatggtttttataacgaacatccaggttcggaaattaatttaattgcgtgcagagaaaatagcaatgcgctattgataaaaatatgaccatgctcgcagttattaactttgtgtaattttaggaatttataaagttatatataacaaatcccaataattaagttattgggatttgtctggtgaattatttgtcgctatctttccccgccagcagtttatccagctcatcgccaccgacgtgacggaaatcctgccccttcacgtagtagaagataaactcacaaatattctggcagcggtcgccaatacgttcgatagaacgcgcgcagaacagcgcagtaagtacgctcggaatggtacggctatcttccatcatgtaggtcatcagttgacgaacaataccttcgtattcctgatcgacttttttatcttcacgataaatacgtaccgcttcgtcaatgtccatccgcgcgaacgcgtccagcacgtcgtgcagcatctggatggtatgacggcccaggctctccagacttaccagcaacggctgatgctgctgggagaatttctccagcgcagtacggcagattttgtccgccacgtcgccaatacgctccagctcggcaatggttttactgatcaccataaccagtcgcaggtcgctcgccgtcggctgacgtttggcgataatgcgcacgcaggcttcatcgatcgccacttccatcatgttgacgttcttgtcgccttcgatgacgcgcttcgccagatcgctgtcctggttatgcatcgcggtgattgcatcagaaagctgctgctccaccatgccgcccatggtcatcacctgcgtgcggatactttccagttcggcgttgaactggccggaaatatgtttattaagattgagactgtccataacgcactcctgaatcaaccgtaacgaccggtgatgtagtcttctgtttgtttcttcgctggcttggtgaacagatcgtccgtgttgctgaactcaatcaattcgcccaggtacataaacgccgtgtggtcggaacaacgcgcagcctgctgcatgttgtgggtgacgatcaccacggtgtaatcctgcttcagttcggtgatcagctcttcaatacgcccggtagagatagggtcgagcgcgctacacggttcgtcgagcagcagcacttccgggcgaatggcgataccacgcgcaatacacagacgctgttgctgaccaccagagagagagtaaccgctctggtgcaatttatctttggtttcgttccacaatgcggctttggtcaatgcccactgcacgcgctcgtccatgtcggcacgggagagcttctcaaacagacgaacgccaaaagcgatgttgtcgtagatggacatcggaaacggcgtcggtttctggaacaccatgcccactttcgcacgcagcagtgcgatatcctgagagttggtcaggatgttgtcgccatcaagcagaatttcaccttccgcacgctgctccgggtacagttcaaacattttgttgaaggtacgcagcagcgtgcttttaccgcagccggacggcccgataaacgccgttacctggtttttagcgatatccaggttgatgtttttcagggcatggaatttgccgtagtagaagttcaaattacgaacctgaattttactcggggcagtttcaaccatactcattgcaatcttttcctcatcgtgcctgatgcacttcgctaatcaggcttaccgtaggccggatcaggcgttcacgccgcatccggcaaagtgttaaccgtgtacagagtcaaaaaggcgctcggtcggtcccctcgcccctctggggagagggttagggtgaggggaaaaccgtgtcagcaatatcaaccgtgtttattcttcgcaaaaacaacgcgcgccagaatgttcagcagcagtacgcacagggtaatgatcaataccccggcccaggccaattgctgccattccgcaaacgggctcatcgcaaacttaaagatcgtcaccggcaggttggcgatcggctgcatcatgtccgtgctccagaactggttggagagcgcggtaaacagcagcggcgcggtttcaccagcaatacgggcaatcgccagcaggataccggtcataatcccggacacgctcgctttcagcgtaatcgcagagatcatcttccacttcggtgtacccagcgcataagccgcttcacgcaggctgtacggcaccagtttcagcatgttctcggtggtgcggataacaatcggcacctgcaacaacgccagggcaatcacgcccgcccagccggagaagtgctccatctgcgccaccacaatggtgtaaacaaacagaccaaccacaatgctcggcgcagagagcagaatgtcgttaatgaagcgaatcacttctgccagccaggatttacgaccatattccgccagataaatccccgccataatgcccagcggcgtaccgaataccgtggcccacaaaattaacagcccgctacccgccagagcgttcgccagaccaccaccttccgtattgggcggcggcgtcatttcagtgaacagcgccaggctcataccgtcgataccgcgagtgatggtggacattaaaatccagatcagccagaacaggccgaaggccatcgtcgccatgctgagcgtcagcgcaatacggtttttgaggcggcgacgcgcctgcattttgcggcgagattcagccagcgccgcagtggtttgcatttcaaccatagccattagcgtgccccctcattcttagccaggcgcataatcataaacttgcttgcggcgaggacgatgaaggtaatcacaaacaggatcaggcccagttccatcagtgcggcaacgtgcagaccggattccgcttccgcaaattcgttcgccagcgcagaggtgatactgttgcccggcatatacaggctggcgctgtcgagctggtaggtgttaccgatgataaaggtcaccgccatggtttcaccgagcgcgcggcccagccccagcatgatgccgccgataacaccatttttggtgaacggaagaacgatacgccagataacttcccaggtggtgcagccaataccgtaggcgctctctttcatcatcaccggggtttgttcgaacacatcacgcattaccgccgcaatgtacggaataatcatgatggcgaggatcacgcctgccgcgaggataccgataccaaatgcggggccagagaacagcgcgccaacaatcgggatattgctcatgatattgccgaccggctcctgaaagtaaacggcgaacagcggcgcaaagataaacaggccccacatgccgtaaacgatacttggaatggctgccagcagctcaatggcgatacccagcgggcgtttcagccagccaggcgcaagctcagtcaggaacagggcgataccgaaactcaccgggacggcgatcagcagcgcgataaagctagtcaccaacgtaccgtagatcggcaccagcgccccgtagatatcgttcggtgcatcccactctttggtccataggaaagccagaccaaatttctgaatgctcggccaggaggagatgatcagagagacaataatgccacccaacatcaatagcacaatcagcgccgccagttttaccagcacgctgaaaattatgtcgccctttttacccggtgggttaaaagcaggcttggttgcagccataagttactcttcagttaaacgcgtttacaaagtcattttgtaatgccggatgcggcgtaaaacaccgtacccggcctggagttttattagtacagcggcttaccgctactgtctttaatattggtcttccacgcagcgcgaacctgttcaactacactatccggcaggctggcgtaatccaggtcgttcgcctgtttagccccggttttgtacgcccagtcgaagaatttcagcacttctgtgccttgttctggtttcttctgatctttgtggatcagaatgaacgtggtagaggtaataggccatgcatcttcgcctttctggttggtcagatcctgagcgaaggttttgctccagtctgcaccttttgctgcattagcgaagttttcttcggtcggactaaccggtttaccatcagcggagatcagtttggtgtacgccaggttgttctgcttcgcgtaagcatattcaacataaccaattgcacccggcagacgctgaacgaacgcggcgataccgtcgttacctttaccgcccagaccgatcggccattttacggtagagccagtaccaacgttgtttttccactcttcgttcactttcgccaggtagctggtgaagacgaaggaagtcccggagccatctgcgcggcgtactacagcaatgttttgactaggcagtttcagacccggattcagtttggcgatggcttcatcatcccacttcttgattttgcccaggtagatgtcgccgagggttttaccatccagcaccagttcgccagacttcagccctggaatgttaaccgccagcaccacgccgccaatcacggtcgggaactggaacagaccttcctgagccagtttttcgtcagacagcggcgcgtcagaggcaccaaaatcaacggtattagcgataatctgttttacgccaccggaagaaccgataccctggtagttaactttattaccggtttctttctggtaagtgtcagcccatttggcatacaccggcgcagggaaggttgcacctgcacctgtcaggcttgcttctgcaaacacagagaaagcactcatgcttaaggtcgcggcgacaacagttgcgacggtggtacgcataactttcataatgtctcctgggaggattcataaagcattgtttgttggctacgagaagcaaaataggacaaacaggtgacagttatatgtaaggaatatgacagttttatgacagagagataaagtcttcagtctgatttaaataagcgttgatattcagtcaattacaaacattaataacgaagagatgacagaaaaattttcattctgtgacagagaaaaagtagccgaagatgacggtttgtcacatggagttggcaggatgtttgattaaaaacataacaggaagaaaaatgccccgcttacgcagggcatccatttattactcaaccgtaacgctttttgccaggttacgcggctggtcaacgtcggtgcctttgatcagcgcgacatggtaagccagcagctgcagcggaacggtgtagaagatcggtgcaatcacctcttccacatgcggcatctcgatgatgtgcatgttatcgctacttacaaaacccgcatcctgatcggcgaagacatacaactgaccgccacgcgcgcgaacttcttcaatgttggatttcagtttttccagcaattcgttgttcggtgcaacaacaataaccggcatatcggcatcaattagcgccagcggaccgtgtttcagttcgccagcagcgtaggcttcagcgtgaatgtaagagatctctttcaacttcaatgcgccttccagcgcgattgggtactgatcgccacggcccaggaacagcgcgtgatgtttgtcagagaaatcttctgccagcgcttcaatgcgtttgtcctgagacagcatctgctcaatacggctcggcagcgcctgcagaccatgcacgatgtcatgttcaatggaggcatccagacctttcaggcgagacagcttcgccaccagcatcaacagcacagttaactgagtggtgaatgctttagtggatgccacgccgatttctgtacccgcgttggtcattagcgccagatcggattcgcgcaccagagaagaacccggaacgttacagattgccagactaccaaggtaacccagctctttgctcagacgcaggccagccagggtatccgcggtttcgccagactgactcaaggtgatcatcaggctgttacgacgcacggcagatttgcgatagcggaattcagaggcgatttcgacgtcgcacggaatacctgctaggctttcaaaccagtagcgggaaaccataccggagttataagaagtaccacaggcgaggatctgaatatgctcaaccttgctcagcagttcgtcggcgttcggtcccagctcgcttaaatcaacctgaccgtggctgatgcgtccggtaagggtgtttttgatcgcgttcggctgttcgtagatctctttctgcatgtagtgacggtaaatgcctttatcgcccgcgtcatattgcagattggattcgatatcctgacgttttacttccgcgccagttttatcgaagatgtttacgctacggcgagtgatttccgcaatatcgccctcttcaaggaagataaagcgacgggtcaccggcaacagcgccagctggtcagaagcgataaagttttcgcccatccccaggccaatcaccagcggactaccagaacgtgccgccagcagggtatccgggtgacgggagtccatgatcactgtaccgtacgcaccacgcagctgcgggatagcacgcagaacggcctcacgcagagtcccgccttgtttcagctcccagttcaccagatgggcaatcacttcggtgtcggtttcagaaacgaaggtatagccacgcgcttttagctcttcacgcagcggttcatggttttcgatgatgccgttatgcaccaccacaatgtgttcagaaacatgcggatgcgcattcacttcactaggttcaccgtgggtcgcccagcgagtgtgagcaataccagtgccgccatgcagaggatgttcttccgctgcctgtgccagcatctggactttaccgaggcgacgcaggcgggtcatatgaccttctgcatcaacaacggccagaccggcagagtcatatccgcggtattccagacgacgtaaaccttcaagaaggatttctgctacatcacgttgcgcgatcgcgccaacaattccacacatagtttttgattccgatttatatcgttgtcggtcaacctgtatgcccgttttttcgggcgccccgagccttgtagagagtggggttatttttatagttactgcttgtgggagggagattatgttatctcctcatcccatgtgaccgggttagccggccagaatcactttttctttaccggacgacgccagccttctttctgagtctgcggcacacggctgatagctaatgcattttcgccgacattacgcgtcacagttgtacccgcagcaatggtcgcgcctttgcctactgttaccggggccaccagctgagtgtcggaaccaacaaacacatcgtcgccgataatggtcttaaatttattcgcaccatcgtagttgcaggtaatggttcccgcgccgatgttaacgttatcgccaatttccgcatcgcccaggtaagtcagatgaccagctttgctgcctttacccagacgcgcttttttcatctcaacgaagttaccgacgtgagcaccttccagcaactcagcaccaggacgcaaacgggcaaacgggccaatggtacaggccgctgccagattcgcatcttccacaacggtatacggactgatttcgcaatcatcgccaatcacgctgtttttaatcacgcaaccggtgccaattttcacgcgatgaccgagagtcacgttgccctcgatgataacgttagtatcaatttcaacatcgcgcccgtgagttagcgtaccacgcagatcaaaacgcgctggatcgcgcagcataacgcctgctaacagcagtttttcagcctgttcggactgataaacacgctccagacgggagagttgcaggcggttattcacgccttctacttcgcttaaacgttgcggatgaacggcgacgatttcacgcccttcctgatacgccagcgcaataatgtcggtgatgtagtattcgccctgagcattattgttggtcagcttcgccagccagcgtttcatatctgcgccgttggcaatcagaatgccggtgttgatctcctgaatctgacgctgctcgtcggtggcatctttgtgctcaacaatgccggtaactttgccgttttcacgggtgatacgtccataaccggtcggatcatccagtttcaccgtcagcagaccaatgccaccctgcggtttagcatcacgcagacgctggagtgtttcgacagagatcagcggcacgtcgccgtagagcattaaaatgtcttcatcatcggcaaagaaaggtgcggcctgctgcattgcatgacccgtacccagctgctctgcctgaagcacccagttaaggttgtcgtctttcagcgcctgttttagcagatcgccgccgtgaccgtacaccaggtgaacgtgcgctgcgcctaattcattcgcagcatcaatgacatgctgaaccatcgctttcccggcaagggtatgcagcactttcggaagatcggaatacatgcgcgtgcctttgcctgcggcaaggatcactacgctcatagcattattcaacatacgcgtcctgactgtaatttgagaacgaatttaaaccgcttcaccttgaaaaaactacatttttttcatcgtgaaatggacagaggataaattgttcaataacggattatccccgctgacgaaagcgccattttcgaccatcgtcacgccttttgtctgcagaaaattaaggcagtaccttaatttaagcgtcaggtggatgtttttgctcttatttcgatcaatgaataaacaggaaaacaggggggttttatatcagcaggatctatgtgaacgctattcaggacgggtcacacgcgcaaaaaaaagccagcctgtttccagactggcttttgtgcttttcaagccggtgttacatcgcttttttggtcaactcgataacgcgcagctgcgcgatcgctttggccagttccgcagacgcctgagcgtaatctacgtcgccgtgagagctgctaatgtgctcttcagccttacgtttcgcttccatggctcgcgcttcgtcgagatcctggccgcgaattgcggtgtcggccagaacggtcacgttgccaggctgcacttcaagaatgccgccagacagatagataaactcttcgtgaccgtgctgtttcacgatgcgaatcataccaggcttaatggcggtgagcagcggtgcgtggccagggtagatccccagttcaccttcgctacccgttacctggattttctcgaccagaccagagaacatttgttgctctgcgctgacgacgtccaggtggtaagtcattgccatatcaccctccgattaaggcgttaaagttttttggctttttccacagcttcttcgatggaaccgaccatgtagaacgcctgctccggcaggtgatcgtattcgccttccatgatgcctttaaagccacggatggtgtctttcagggagacgtatttacccggagaaccggtgaatacttctgccacgaagaacggctgggacaggaagcgctggatcttacgagcacgcgctaccaccagtttgtcttcttcagacagttcatccatacccaggatggcgatgatgtctttcagttcctgataacgttgcaggatggactgaacgccacgcgcggtgtcgtagtgttcctgaccaaccaccagcgggtccagctgacggctggtggagtccagcgggtcaacggccgggtagatacccagagacgcgatctgacggctcagtaccacggttgcgtcaaggtgcgcaaaggtggttgccggagacgggtcagtcaagtcatccgcaggtacgtatactgcctgtacggaggtgatagaaccagttttggtggaggtgatacgttcctgcagaacgcccatctcttccgccagggtcggctgataacctaccgcactaggcatacggcccagcagtgcggatacttccgtaccggccagggtgtaacgatagatgttgtcaacgaacagcagaacgtcacgaccttcgtcacggaatttctcagccatggtcagaccggtcagagcaacgcgcagacggtttcccggcggctcgttcatctggccatacaccagggatactttgtcgataacgttggagtcggtcatttcgtggtagaagtcgttaccctcacgagtacgttcacctacgcccgcaaacacagagtaaccggagtgctcgatcgcgatgttacgaatgagctccatcatgtttacggttttacctacacccgcaccaccgaacagaccaactttaccgcccttagcgaacggacacatcaggtcgataactttgataccggtttccagcagttcctgagagttactcagctcttcgtaggaaggtgctgcgcggtgaatcgcccaacgctcttcttcaccgatctcgcctttcatgtcgaccggttcacccagtacgttcatgatacggcccagagtcgctttacctaccgggacttcaatcgggtgttcgaggtcttttacatccagaccgcgacgcagaccgtcggaggaacccattgcgatggtacgtacgataccgccgccgagctgctgctgaacttccagcaccagacgctcattaccattttgcacctcaagagcatcgtacacgcgcggtacggcatcctgagggaattcgacgtcaactacggcgccgattacctggacaatctttccagtagccatcttaaatcctctacgaaataacctgtttaaaccgcggcggccccgctgacgatctcggtgagttcctgagtaatgctggcctgacgagctttgttgtataccaactgcagctctttaatcaggctgccgccattgtcggtcgcggctttcatcgccaccatacgggcggcctgctcgctggccaggttttcaaccacgccctgataaacctgagattcgacataacgacgcagcagggtatccagcaacgccttcggatcgggttcgtacaggtaatcccaggatttatgtttcagatcatcatcatcacttgccggtaacggcagcagctggctgatggtcggaacctgagacatggtgttaataaatttgttgctgacaatgtaaagcttgtccagacggccttcgtcgtaggcctgcaacatcacttttaccggaccgatcagttcggacagggaagggttatcccccatgccggtgacctgggcaacaacattgccgcccacggagttgaagaagctcacgcctttgctgccgatcattgcgaggtcgcattgaacgcctttgtcggtccaggtcttcatttccgccagcagttttttgaacaggttaatgttcaaaccaccgcacaaaccacggtcggtgctcaccaccaggtagcccacgcgtttaacgtcgcggtcttccaggtaagggtgcttatattccagattaccgtgtgcaaggtgaccaatcactttgcgcatggtttctgcataaggacggctggccgccatgcgatcctggcttttacgcattttggaagcggcgaccatctccatcgctttagtgatcttttgcgtgttctggacgcttgcgatcttactacgtatctcttttgcgccggccatgagcttctcctcaatgccttgcggcctgccctaaggcaagccgccagacgttaccaggattgggttgctttgaaggaatcgaggatgcctttcagcttgccttcgatttcgtcgttgtagccaccggtctggttgatctcttgcatcaacggagcgtgatcacggtcgacgtaagccagcagagcggcttcgaagctgccaattttgctcagttcaacatccgccaggtaaccacgttctgctgcgaacagaaccagagactgctgcgcaacggacatcggcgcatactgtttctgtttcagcagttcggtcactttctgaccgtggtcaagctgcttacgtgttgcatcgtcaaggtcggatgcaaactgagagaacgctgccagttcacgatactgtgccagagcggtacggataccaccggacagttttttcatgatcttggtctgtgctgcaccaccaacacgggatacggaaatacccgggttaaccgcaggacgaataccggcgttgaacaggttggtttccaggaagatctgaccatcggtaatggagattacgttggtcggaacgaacgcagaaacgtcacccgcctgagtttcgataatcggcagtgcggtcagagaaccggttttccctttcacttcacctttggtgaaggcttcaacgtattcggcgttaacacgtgcagcacgctccagcagacgagagtggaggtagaaaacgtcgcccgggaatgcttcacgtcctggcggacgacggagcagcagggagatctgacggtaagcaacagcctgtttagacaggtcatcgtaaatgatcagcgcatcttcaccgcggtcacggaagtattcgcccattgcgcaaccggcatacggtgccaggtattgcagtgcagcggattcagacgcggttgctaccacaacgatggtgttagccagtgcgccgtgctcttccagtttacgtaccacgttagaaatggtggacgctttctggccgatagcgacatagatacatttgataccggaatcgcgctggttgatgatggcatcgatagccagtgcggttttacctgtctgacggtcaccgatgatcaattcacgctgaccacgaccgattgggatcatggagtcaacggctttataaccggtctgtaccggctgatctacggactgacgttcgataacgcccggagcgattgcttctacagcagagaagccgtcgtgatccagcggacctttaccgtcgattggtgcacccagagtgttaaccacacggcccagcaggccacggccaaccggaacttccaggatacggccagtacacttaactttcatgccttcggcaaggtcagcgtacggacccataacaaccgcacctacagagtcgcgctcgaggttcagtgcgatagcgtaacggttacccggcagggagatcatttcaccctgcatacaatcggccaggccgtgaatgcggataacaccgtcacttacagaaacaatagtaccttcgttgtgagcttcactcacaacattgaactgagcaatgcgctgcttgatcagttcgctgatttcggtggaattcagttgcatgctccagtccccttaagactgcaagacgtctgcaaggcgctcaagacgaccgcgtacgctgccatcaatgaccatatcacccgctcggatgataacgcctgccattacagacttatcgattttgcaattcagcttaactttgcgactcagacgtttttccatcgcagcagaaattttcgcgagctgttgttcactcagtgcggcagcggaaatgacgtctacctcagcggtagcctcactcacggcacgcaggtgaataaactgctccagaacatccgggagcgcgttaagacgaccattttcagccataacccgaatcaggttctgaccgttttcgtccagttgctcaccacaaactgcgataaagctctcggcgagcgtttctggcgcaagcgcgccagagagaagctctgccatttgttcgtttttggttacctcggcggcaaacgccagcatgtcctgccagcgttctacactttggtgttcgacggcaaagtcaaaagctgctttggcgtaggggcgagctaccgtaataaattcagacatcagcccctccctccttacagttcagcgacaagtttatccacgatgtcgctgttagcagcttcatccacggaacgttcgatgatcttctcggcgccagcaacagccaggatagcaacttgcttacgcagctcttcacgggcacgtttacgctcggcttcaatttccgcctgcgcctgggccacgattttagtacgttcctgttctgcctcagctttcgcttcgtccagaatctggctgcggcgtttgttcgcctgctcgatgattacctgggcttccgctttcgcttttttcagctggtcggtcgcgctggcctttgcaaggtcaaggtccttatgtgctcgttctgcggaagcaaggccgtcagcaatttctttttgacgtttttcgatggctgccattaatggcggccatacgtacttcatgcagaacagaacgaacaggacaaacgcgatggcctggccgaggattgttgcgttaagattcacagcacaatgcctctatttagttaacgttctgatattgctctttaaataaaagcaacgcttattacgcgacagcgaacatcacgtacagacccagacctacagcgatcatcgggatagcatccaccagacccataacgataaagaactgagtacgcagcagaggaatcagatcaggttgacgcgctgcgccttccaggaatttacccccgaggatgccgataccgatcgcagcaccgattgccgccagacccatcatcacagcggcagccatgtacagcagatccatattcaggttttccatgacagtctccagtttgtttcagttaaaacgtagtagtgttggtaaattaatgttcttcagacgccatgctcagatagacgatcgtcagaaccatgaagatgaaggcttgcagcgtaatgatcaggatgtggaaaatggcccacggcacattcaggatccactgactccaccacggcaacagaccagcaatcagaatgaaaatcagctcaccggcatacatgttaccgaacagtcgcaaaccgagactaactggtttggacagcaggcttaccccttcaaggattaagttgacaggaatgaacgcccagtgattgaacggctgcagcgtcaactctttcgtgaagccgccgatgcctttcattttgatgctgtagaacagaatcaggataaatacgcccagtgccatagacagcgttacgttcacgtccgcagacggaaccacacgcagtgcaggcagacccagtacatgttcagcaatgtacggcagcaggtcgataggcagtaaatccatcaggttcatcaggaatacccagacgaagatcgtcagggccagcggagcaatcagcttgcttttgccatggtacatgtctttcacgctaccattaacaaagccgatcaccagctcaatcgcggtctgaaacttacctggcacaccgctggtcgcctttttggctacgctacggaataaaaccaggaacaacagacccagcaccacgctgaagaacatggagtcaatattgattgtccagaaggtggctggggggttttgtggatccaccaggctgaatgtacgcaggtccagctgaaggttattcaggtggtgtcctatgtaatcctgcggcgtcatattttcactagccatgatgccttttaccctttgttgttaattacagccggtgccagtatctgaaccaccagcaccaaaacccacgtaacgatcagcggcaagaataccgcctttaaaaccgccaacgccaccaccagtaacaccaacatcgccagaactttgaaagcttcgccaaatgcgaatgtccaggccacccggcctttcgctggtgtatgcgcctggtgacgccaggcaaatatcataaacaaaacgttaggcagaaagactgccaggcccccgcttattgcagagacgccccagaaggggtctttgaggctgaacagcaatccacttgctatcaccaccagtaactgaacgagcagaagcttccgagcaacgtttcgactcacgaggctcacagacatcacgtttttcactcctgctcccttcgaggtatgccgcgtgtcgtataaaactttctttaaggcttagagtcaagcatcaaaaagcggtcaaattatacggtgcgcccccgtgatttcaaacaataagtagccaaaaggtgaataaatgtttaaatatttttccagtgcatacaattgcgacttttctgctaaccctgttcgatcatgaaaaactgtaaataacgcgtaaacactggtgataaagcgtgcttcagatcacatattgcgcatgttcgcgcacagcatatttatttacttggcaaatgatgcctttgcaagtttatgatatttcagtctaaaaacagatactgttttaataaatgacatttacacaacaaaaaccacccattgacatttttaataatgttttaacagccaatgatggttcttagcgccgatttttagcagactgatattttcactaatgacttattttctgcttaccaaaaaaagccacgttatcttgttgatgcaaaagagtgaacgtggcgttaaatgtaaccagttatatcagtagaaaacctggttgttgttaacagtctaaccggtcaattttttatgatttttttgataaaaattaaattttatttgctttaatcaccaccagatgacgttcgccatccagggctggaacctgaagtttaaccacactttcgacctgatattcttcgggcaacaaagcgatttcatcttccggcatttgccctttcagcgcgtagaaacggccttgctcaccaggaagatggtggcaccagctcaccatatcgttcagagaggcaaaagcgcggctaattacgccatcaaatggcggctcactaggaaactcttctaccctgctctgtactggttcaatattctccagtttaagctcatgttgcacctgacgaaggaaacgcacgcgtttaccaaggctatccaacagagtgaaatgggcttcaggacgcacgatagagagtggaatgcctggcagtcctggtccggtgccgacatcgataaaccgttcaccttgcagatacggtgccaccacaatgctatcgagaatatggcgtaccagcatctcattaggatcgcggacgctagtcaggttgtacgctttgttccatttatgcagcatattcacgtaggcaataagctggtttttctggtgatcggtaaggctaatacctgcgtctttcagcagtaaggagagtttgttgagcacggtgattacctgttcttgatgcgttgcctggtaagcgggtgcttaccaggcatttttaatgcgttatgcgctacgacgcagcataccctgttttttcagccacaccagcagaatggagatggccgcaggcgtgacgccagaaatacggctagcttggccgatagaggctggtttgtgatcgttaagtttggcgatcacttcgttagaaagaccggatacctggcggtaatccagtgtcgcgggtagcagggtgttctcgttacgcagctgcttttcgatctcatcttgctggcgcgcgatataaccttcgtatttaacctgaatctcaacctgttccgccgcctgttcgtctgtcaacgcaggggcaaacggcgtcagcgtggttaatttttcataagtcatttccggacgacgcagcagatcttcaccactggcttcacgggaaagcggcgcagtcaggtgagcattcacttcggctgcagcttccgcgctcggggttacccaggtgcttttcagacgctgacgctcacgctcgatattctcaagtttctcgttaaagcgcgcccaacgttcgtcatccaccaggcccagttcacgaccgatttcagtcaaacgcagatccgcattatcttcgcgtagcatcagacgatattctgcgcggctagtaaacatacgatacggttctttggttcctaaagtgcacaggtcatcaactagtacgccgagatacgcctgagaacgtgccggagcccaaccttctttgtcagcagacagacgggcagcgttaagaccggccagcaaaccttgcgcagcggcttcttcgtaaccggtagtgccgttaatctgaccagcaaagaacagcccctggataaacttgctctccagcgtcggtttcaggtcgcgaggatcgaagaagtcatactcaatggcataacccggacgcacgatcttcgcgttttccatcccctgcatagagcggacgatttgcatctgcacatcgaacggcaggctggtggagataccgttcggataaatttcattagaggtcagtccttccggttcaaggaagatctgatgctgatttctgtcggcgaagcgcatgactttgtcttcgatgctcgggcagtagcgtgggccgacaccttcgatcacccctgcgtacattgggctacgatcgaggttactgcggatcacatcatgggttttctcgttggtatgagtgatataacacggcacctgctggggatgctgggacgcattgcccataaagctgaataccggcattgggttatcgccatgctgttgcgccagtacgctaaagtcgatggttcgagcatcaatacgcggtggtgtcccggttttcagacgaccaacgcgcagcggcagttcacgcaaacggcgagaaagcggaatggacggcggatcaccagcacggccaccgctgtaattatccagaccgatatgaattttaccgtcgaggaacgtcccaacggtgagcacgacggctttggcacggaacttcagtcccatttgggtaacagcaccgaccacgcgatcgttttcgacaataagatcttcaaccgcctgctggaagatcatcaggttcggttggttctccagcgccgtacgtaccgcctgacggtagagcacacgatccgcctgagctcgggtagcgcgaaccgccggtcctttgcttgcgtttagtatcctaaactggatacccgcctgatcgatcgctttcgccatcagaccgccgagtgcatccacttcttttaccagatgtcccttcccaataccgccgatcgccgggttgcagctcatctgccccagagtgtcgatattgtgtgtcaaaagcagagtctgttgacccatacgcgccgcggccatcgcggcctcggtgcctgcatgacccccgccaatgatgatgacgtcaaaaggatccggataaaacatggtgattgcctcgcataacgcggtatgaaaatggattgaagcccgggccgtggattctactcaactttgtcggcttgagaaagacctgggatcctgggtattaaaaagaagatctatttatttagagatctgttctattgtgatctcttattaggatcgcactgccctgtggataacaaggatccggcttttaagatcaacaacctggaaaggatcattaactgtgaatgatcggtgatcctggaccgtataagctgggatcagaatgaggggttatacacaactcaaaaactgaacaacagttgttctttggataactaccggttgatccaagcttcctgacagagttatccacagtagatcgcacgatctgtatacttatttgagtaaattaacccagcttcccagccattcttctgccggatcttccggaatgtcgtgatcaagaatgttgatcttcagtgtttcgcctgtctgttttgcaccggaatttttgagttctgcctcgagtttatcgatagccccacaaaaggtgtcatattcacgactgccaataccgattgcgccaaagcggactgcagaaagatcgggcttctgttcctgcaatgcttcatagaaaggagaaaggttgtccggaatatctccggcaccgtgggtggagctgataaccagccagatcccactggcaggtaaatcttctaacagcggaccgtgcagcgtttcggtggtaaaacccgcctcttccagcttttcagccaggtgttctgctacatattcggcaccgccgagggtgctgccgctgataagagtgatatctgccataaaccgccacctttattaagagtggcgtattgtacgctgtgaacgcgttgggatctacctgtggaaaagtatgggattaaaaaagccgatcagggcttgatggtacgcatgatcgggttttgcaggacgatcaatgtctcggtggactgaatttcatcaattgtttggatcttgttgataagtacatgctggagagcgtcgatgctacggcacatcacttttataaagatgctgtagtggccggttgtgtaataggcttcagtgacttcatcaaggctttccagctttgccagcgcggaagggtagtctttggcgctctttaatataatgccgataaagcagcctacgtcataaccgagctgcttcgggctgacatcaatacgcgccccggtaatgatccccgcctgcttcattttctctactcgaacgtgaatcgtccccggactgacgccaaattgtttcgccagttcggcgtaagcggtgcgcgcattgcccattaatgcttccaggatgccacggtccagattgtcgatcagataattttccataggattttcttatgcggattgatgattcattctattttagccttcttttttaatgaatcaaaagtgagttaggctttttattgaatgattattgcatgtgtgtcggtttttgttgcttaatcataagcaacaggacgcaggagtataaaaaatgaaaaccgcttacattgccaaacaacgtcaaattagcttcgtgaaatctcacttttctcgtcaactggaagaacgtctggggctgatcgaagtccaggcgccgattcttagccgtgtgggggatggcacgcaggataacttgagcggctgtgaaaaagcggtgcaggtaaaagtgaaagctctgcctgatgcccagttcgaagtggttcatagtctggcgaagtggaaacgtcagaccttagggcaacacgacttcagcgcgggcgaagggctgtacacgcacatgaaagcccttcgccccgatgaagaccgtctttctccgttgcacagcgtctatgttgaccagtgggactgggaacgcgtaatgggcgacggtgagcgtcaattcagcactctgaaaagcacggtagaggcgatctgggcgggaattaaagcaaccgaagctgcggttagcgaagagtttggcctggcaccgttcctgccggatcagatccacttcgtacacagccaggagttactgtctcgttatccggatcttgatgccaaagggcgtgagcgggcgatagcgaaagatcttggcgcggtattccttgtcgggattggcggcaagctgagcgatggtcatcgccacgacgtgcgcgcaccggattatgatgactggagcaccccgagtgagctgggccatgcgggtctgaacggcgatattctggtgtggaacccggtactggaagatgcgtttgagctttcctccatggggatccgtgtagatgccgacacgctgaagcatcaactggcgctgaccggtgacgaagatcgcctggagctggagtggcatcaggcgctgctgcgcggtgaaatgccgcagaccatcggcggcggtatcggccagtctcgtttgactatgctgctgctgcaactgccgcatatcggccaggttcagtgtggagtatggccagctgctgttcgcgagagcgtcccttctctgctgtaataatttatcgccgccagcgtctgagcaggcggcttcgcatcccggtatcaaagcgccagatatgatcgaaaatgcgcatgatgccgggtttgccgtgtgcgctcatcgccacggcatgaaagcgatgctgatgtacccgctgcagctctttcactttactcgtcacgtcgtcaggcaaccgctgagcgataaaatcagaaatcaccaccgcatcggcatcaaaccattccctgctttgcaagcgttccataatggcgcgaaaacaactggcaagatcggtgccgccacgaaactgctggcttaaaaaacggattgcttgttcgatgccttgtgggccactaagctcataacggacgatctcggtggaaaatagcataatatagcagcgccggttttctgcgagagcaatgcgcatcaaggccaggcagaacgctttcgcacactgttcattaaagccgcccatactgccggaagtatccacacagacaataaacggcccgcgcggctgttcatcgtaatctttatgtaccaccggacgttcgatcactttttcacgccagctctcaccgtgcaggcgataggtgagcaactgtttttccaccagccgacggtaaaactcatactccagttccgttatccctagtgtcgccagttctggcggcaggagacgtaaaatatcatcgctttgttgcagaccatcaacctgctcaggaaccgtcgccggttcgcgcaccatggtgcggaaggtttccatctgcgcatcgttgcgcggtatacttttggcttcccgagaacgccccagctgctctgccaggcgtttcagttccggctgttcgttaagaaattcaccgtatttcacaatcaactgatagtcgccacgtttaagctgaccggcgctcatatcccacagacgaccagctgcagtattgttatctgcgagaatcggttcaagttgtccgctcagcgtcatgcgttcctgaacttcactcaacagttgttcgcgttcttcttctaatagctgttgatttaacgtcgttgcttgcacgatcagacttaaacgccaacgctggagaaaaagcgtgtgtaacgcactagtgatcgtgctgttagcatcaaccaactgtcgggcttgttctgcccatggagaattcagacgatgcagtaagtccaggatctgtggtagctgcacaataaactgtggcgtggagaggagctggctttgctgatagcacatcacctcttcggtgagttccggcgggactcgggcatctttcagccgactgcgcagcgcttcacgccagcggggaacatcatcagtgattgccgccttcaggcgtgggaatttttcaaagaagaccgccagctgcggactggccagcagtgcgatgatcatctcttcgatcaatccctcttcgctgacggccagcatcacattaagcgtatccagcgttagcattgttgtgcctggcgaatctgtgcaccgacatcctgtaggctggcttcaatgcgacctaaccagtcgccagggataaacagacatttttgctgttcgctgaataaagcgtgttgcttgcgccagtcgctttcaagctcttccagttgttgttttatttcaccaggcagaccttcagcgctactaccgggaagtgccagcgtactgccttgtaaacttacatcgcgaacgacaagatgttgggcgctatcaacttccagattcagtttctgggcaaagccgataccgttcagtttaccgcgaatttcaccacctttgctcagccactgttccagcgcgctacgctcaaaggagatatgaaccacttccatatcatgcagttttaacggtttttgcagcagtagagtcagagtggaagcagtaacgttaacaggaagttgatactgctgacgacggctgaaaatgccgcccagacgaattaccgttaaggctgttttatcgctttgttgctgctggagttgcaggtgacgttgcacaatcgcgccaaggcgagtcaacatcccttgctgttgccaggcgtgaccggtcatcaatacatcaatttgttgttgtatcaaattcaggctttgcgcgtcataccacaggcaatctttcagcaaaatgagatctaccggggcaacagcactgcgaccgctaaaaaaggcgctggcctgcaataatcggatcgcttttttccagcgacgatcgctgacataaggcgcatccggtaatttatccagttgctggcgcagcataaaaatcagctcaaatacatgatcgggcagcgtaatttcaccaatctctttctgccagcgttcatattcttcatctgtgacctgcaaggcatcaggaaccggattgtcgttttcatcctgttgactggtcagcatggagcggaaattcgctttatcctgcactttatctaaccacagacgaatcagcatgcggtcatataacgcttccagactgctgtctgcttccggcagctcgttggaggccgccaccagcagacgcatcgggattttttctacgtgtgcaccgttgcggaactggcgctcgttaatggcggtgagcaaggtattaagaattgccgggcccgctttccagatctcatccagaaagacaatttctgcttccggcaggtaaccgctggttaaacgttcatagcgcccttcatcttttagcgcctgaatagaaaggggaccaaaaacttcttccggcgtggagaagcgggtcatcagatattcaaacgcgcgggcattctgaaaggcgaattttaagcgccgggcgatcaaacttttggcaatacctggcgggccaaggaggaacacactttcaccacttaatgccgctaataaacacaagcggatggcgtggctacgttcataaagccccttttccaagctactgctcaggcgggaaattctttccgctaataaatgagggtgagccataatgaagtggcgtcctttcgtcaaaagttctgcgtaaattgcgagtatagacgtttcttgctggtggctaaaatagtctcaaagggggggtatttttctttgagccaggttaatgtggccgcatttaggagtacgattttgccgttaatcgtgcatactgtgcgcttttttgtgggccaagggactaagcacacatttcatatttcaacgaaagactagtctatgagcactgataataagcaaagtttgcccgcgattaccctcgcggcgattggagttgtctacggcgatattggtaccagcccgttatatacacttcgtgaatgtttgtccggccagtttggttttggcgttgaacgcgatgccgtgtttggctttttaagcctgatcttctggctgctaatctttgtggtttccattaaatatctcaccttcgtgatgcgggcagataacgccggtgagggggggatcctgacgttgatgagccttgccgggcgtaatacgagcgcgcgaaccacaagtatgctggtgattatggggctaatcggcggcagctttttctatggtgaagtcgtcataacacccgctattagcgtgatgagtgccattgaaggtctggaaatcgtcgccccgcagctggatacctggatagttcccctcagtattatcgttctcactttattatttatgattcaaaaacatggcacggctatggtcggtaagctgtttgcgccgatcatgctgacctggtttttgattctggcaggactggggttacgtagcattattgctaacccggaagtgctgcatgcgctgaatccaatgtgggcggtgcatttcttccttgaatacaaaacggtttcttttattgcattaggggcagtggtgttgagcattacgggggtcgaggcgctgtatgctgatatggggcactttggtaagttccctattcgcctggcgtggttcaccgtcgtattaccttccttgacccttaattacttcggtcagggagcgctgttgttaaagaacccggaagcgattaagaacccgttcttcctgttggcaccggactgggcgctgatcccgctgctgatcatcgccgcactggcgacggtaattgccagccaggcggttatctctggcgtcttcagtttgacgcgtcaggcggtacgtctgggatatttgagcccgatgcgcattattcacacctccgaaatggagagtgggcaaatctatattccgtttgtgaactggatgctctatgtcgcggtcgtgattgtgattgtcagctttgagcactccagcaacctggcggcggcgtacgggattgcggtgaccggaaccatggtgctgacgtctattctcagcactaccgtggcacgtcagaactggcactggaataagtattttgttgcgctgatcctgattgctttcctttgtgtcgatattccattgttcaccgctaacctcgataaactgctctccggcggctggttgccattgagcctcggtactgtgatgtttatcgtgatgaccacctggaagagcgagcgtttccgcttgctgcggcggatgcatgaacatggtaactctctggaagcgatgattgctagcctggagaaaagtccgcctgttcgcgtgcccgggaccgcggtgtatatgagccgtgcaatcaacgtcattccctttgcgctgatgcataaccttaaacataacaaggtattgcatgagcgggtgattctgttaactctgcgcaccgaagacgctccatatgtccataacgtccgtcgggtacagattgaacaactgagccccactttctggcgcgtggtggcaagttatggttggcgagaaacgccaaacgtagaagaagttttccaccgctgcggtctggaaggattaagttgccggatgatggaaacctccttctttatgagccatgagagcttgatcctcggcaaacgcccgtggtatttgcgtctgcgcggcaagctgtacttgctgctgcaacgtaatgcgctgcgtgcaccagatcaatttgaaatcccgccaaacagggttatcgaactgggtactcaggtcgaaatctaacgccagacgcctcctttcttcataagggggcgtttttgttttcatggttaatcaccatgtaaaacgtttcgaggttgatcacatttccgtaacgtcacgatggttttcccaactcagtcaggattaaactgtgggtcagcgaaacgtttcgctgatggagaaaaaaatgaaaaaaggcaccgttcttaattctgatattagtagcgtgatctcccgtctgggacataccgatacgctggtggtgtgtgatgctggtttacccatccccaaaagtacaacgcgtatcgatatggcattaacccagggtgtaccttcttttatgcaggtgctgggcgtcgtcacaaatgaaatgcaggtcgaggcggccattatcgcggaagagatcaaacaccataatccgcaactccacgaaacgttgctcactcaccttgagcagctgcaaaaacaccagggaaataccattgaaattcgttacaccacgcatgaacaattcaaacaacaaaccgcagaaagtcaggcggtaattcgcagcggagaatgttctccgtatgcgaatatcattctctgtgctggcgtgacgttctgaggccgtcatggaagcattacttcagcttaaaggcatcgataaagccttcccgggcgtaaaagccctcagcggcgcagcgttaaatgtctatccgggccgcgtgatggcgctggtgggcgaaaacggcgcgggtaaatccaccatgatgaaagtgcttactggcatctatactcgcgatgccggtacgcttttatggctggggaaagaaacgacatttaccgggccaaaatcttcccaggaagccgggattgggattatccatcaggaactgaacctgatcccgcagttgaccattgccgaaaacattttcctcggtcgtgagtttgttaatcgctttggcaaaattgactggaaaaccatgtatgccgaagcggataaattgctggctaaacttaacctgcgctttaaaagcgacaagctggtgggcgatctttccatcggtgaccagcaaatggttgaaatcgccaaagtgctgagctttgagagcaaagtcatcattatggatgaaccgaccgatgcgctgaccgataccgaaaccgaatccctgttccgcgtcatccgcgagctgaaaagccaaggccgcggtattgtctatatctcccaccgcatgaaagaaatcttcgagatttgcgatgacgttaccgtttttcgtgatgggcaatttattgctgagcgcgaagtggcaagtctgaccgaagatagcctgattgagatgatggtgggtcgcaagctggaagatcaatatccgcacctggacaaagcgccgggagatatccgcctgaaagtcgataatctctgcggacctggcgttaacgatgtctcttttactttacgcaaaggcgaaattcttggcgtctctggtttgatgggcgcaggtcgtaccgaactgatgaaagtgctctacggcgcactaccgcgcaccagcggttacgtcaccctggatgggcatgaagtcgttacccgtagtccgcaggatggcctggcaaacggcattgtgtatatctccgaagaccgtaaacgtgacggtttagtgttgggcatgagtgtaaaagagaacatgagcctgacagcgctgcgctacttcagccgcgctggcggcagtttgaagcatgccgatgaacagcaggctgtgagtgatttcattcgtctgtttaatgtgaaaactccgagcatggaacaggcaattggtctgctttccggtggcaatcagcaaaaagtggcgattgcccgcggtctgatgacacgccccaaagtgttgatccttgatgaacctacccgtggcgtagatgtcggcgcgaaaaaagagatctatcaactgattaaccagttcaaagccgatggcttgagcatcattctggtgagtagcgagatgccagaagtattaggcatgagcgatcgcatcatcgtcatgcatgaagggcatctcagcggggaatttactcgtgagcaggccacccaggaagtgttaatggctgccgctgtgggcaagcttaatcgcgtgaatcaggagtaaaaaaatgacaacccagactgtctctggtcgccgttatttcacgaaagcgtggctgatggagcagaaaagccttatcgctctgctggtgctgatcgcgattgtcagcacgttaagcccgaactttttcaccatcaataacttattcaatattctccagcaaaccagtgtgaacgccattatggcggtcgggatgacgctggtgatcctgacgagcggcatcgacttaagcgtaggttctctgttggcgctgaccggcgcagttgctgcatctatcgtcggcattgaagtcaatgcgctggtggctgtcgctgctgctctcgcgttaggtgccgcaattggtgcggtaaccggggtgattgtagcgaaaggtcgcgtccaggcgtttatcgctacgctggttatgatgcttttactgcgcggcgtgaccatggtttataccaacggtagcccagtgaataccggctttactgagaacgccgatctgtttggctggtttggtattggtcgtccgctgggcgtaccgacgccagtctggatcatggggattgtcttcctcgcggcctggtacatgctgcatcacacgcgtctggggcgttacatctacgcgctgggcggcaacgaagcggcaacgcgtctttctggtatcaacgtcaataaaatcaaaatcatcgtctattctctttgtggtctgctggcaagcctggccgggatcattgaagtggcgcgtctctcctccgcacaacccacggcggggactggctatgagctggatgctattgctgcggtggttctgggcggtacgagtctggcgggcggaaaaggtcgcattgttgggacgttgatcggcgcattaattcttggcttccttaataatggattgaatttgttaggtgtttcctcctattaccagatgatcgtcaaagcggtggtgattttgctggcggtgctggtagacaacaaaaagcagtaataacgactacaggacatcttgaatatgaacatgaaaaaactggctaccctggtttccgctgttgcgctaagcgccaccgtcagtgcgaatgcgatggcaaaagacaccatcgcgctggtggtctccacgcttaacaacccgttctttgtaagcctgaaagatggcgcgcagaaagaggcggataaacttggctataacctggtggtgctggactcccagaacaacccggcgaaagagctggcgaacgtgcaggacttaaccgttcgcggcacaaaaattctgctgattaacccgaccgactccgacgcagtgggtaatgctgtgaagatggctaaccaggcgaacatcccggttatcactcttgaccgccaggcaacgaaaggtgaagtggtgagccacattgcttctgataacgtactgggcggcaaaatcgctggtgattacatcgcgaagaaagcgggtgaaggtgccaaagttatcgagctgcaaggcattgctggtacatccgcagcccgtgaacgtggcgaaggcttccagcaggccgttgctgctcacaagtttaatgttcttgccagccagccagcagattttgatcgcattaaaggtttgaacgtaatgcagaacctgttgaccgctcatccggatgttcaggctgtattcgcgcagaatgatgaaatggcgctgggcgcgctgcgcgcactgcaaactgccggtaaaagcgatgtgatggtcgtcggatttgacggtacaccggatggcgaaaaagcggtgaatgatggcaaactagcagcgactatcgctcagctacccgatcagattggcgcgaaaggcgtcgaaaccgcagataaagtgctgaaaggcgagaaagttcaggctaagtatccggttgatctgaaactggttgttaagcagtaattttaatcaggttgtatgacctgatggtgacataaatacgtcatcgacagatgaacgtgtaatataaagaaaagcagggcacgcgccaccctaacacggtggcgcattttatggacatcccgaatatgcaaaacgcaggcagcctcgttgttcttggcagcattaatgctgaccacattcttaatcttcaatcttttcctactccaggcgaaaccgtaaccggtaaccactatcaggttgcatttggcggcaaaggcgcgaatcaggctgtggctgctgggcgtagcggtgcgaatatcgcgtttattgcctgtacgggtgatgacagcattggtgagagcgttcgccagcagctcgccactgataacattgatattactccggtcagcgtgatcaaaggcgaaagtacaggtgtggcgctgatttttgttaatggcgaaggtgagaatgtcatcggtattcatgccggcgctaatgctgccctttccccggcgctggtggaagcgcaacgtgagcgtattgccaacgcgagtgcattattaatgcagctggaaagtccactcgaaagtgtgatggcagcggcgaaaatcgcccatcaaaataagactatcgttgcgcttaacccggctccggctcgcgaacttcctgacgaactgctggcgctggtggacattattacgccaaacgaaacggaagcagaaaagctcaccggtattcgtgttgaaaatgatgaagatgcagcgaaggcggcgcaggtactgcatgaaaaaggtatccgtactgtactgattactttaggaagtcgtggtgtatgggctagcgtgaatggtgaaggtcagcgcgttcctggattccgggtgcaggctgtcgataccattgctgccggagatacctttaacggtgcgttaatcacggcattgctggaagaaaaaccattgccagaggcgattcgttttgcccatgctgccgctgcgattgccgtaacacgtaaaggcgcacaaccttccgtaccgtggcgtgaagagatcgacgcatttttagacaggcagaggtgacgcttggctacaatgaaagatgttgcccgcctggcgggcgtttctaccagtacagtttctcacgttatcaataaagatcgcttcgtcagtgaagcgattaccgccaaagttgaagcggcgattaaagaactcaattacgcgccaagtgctctggcgcgtagcctcaaactcaatcaaacacataccattggcatgttgatcactgccagtaccaatcctttctatagtgaactggtgcgtggcgttgaacgcagctgcttcgaacgcggttatagtctcgtcctttgcaataccgaaggcgatgaacagcggatgaatcgcaatctggaaacgctgatgcaaaaacgcgttgatggcttgctgttactgtgcaccgaaacgcatcaacctagccgtgaaatcatgcaacgttatccgacagtgcctactgtgatgatggactgggctccgttcgatggcgacagcgatcttattcaggataacagcttgctgggcggagacttagcaacgcaatatctgatcgataaaggtcatacccgtatcgcctgtattaccggcccgctggataaaactccggcgcgcctgcggttggaaggttatcgggcggcgatgaaacgtgcgggtctcaacattcctgatggctatgaagtcactggtgattttgaatttaacggcgggtttgacgctatgcgccaactgctaagtcatccgctgcgtcctcaggccgtctttaccggaaatgacgctatggctgttggcgtttaccaggcgttatatcaggcagagttacaggttccgcaggatatcgcggtgattggctatgacgatatcgaactggcaagctttatgacgccaccattaaccactatccaccaaccgaaagatgaactgggggagctggcgattgatgtactcatccatcggataacccagccgacccttcagcaacaacgattacaacttactccgattctgatggaacgcggtagcgcttaattactcgctttcacttggaacgcggttcggcttagatttacgctgtcttttgatcaaattattaccatcggttgttttcagaagcatgaacattgctgcactagcaacagtaataatgcccattgtgataaacgtatagtggaattgttcgacagtcgttgtgccttccattccttcataaacgcgaaggacggccgcacttacagcaacgcctaaactaatgctcagttgctgcgtgaccgccagaacactgttaccgctgctggcattgtcatcggtcagatcggcaagtgtgatggtattcatcgcggtaaactgcgtgctcatagccatccctaatataaacaacggcaagatcagcatccatatagccattgctggactttgcaaagagaactgagcgatcattagcccaataatcaccgtgatccccactaacgtatggcgatagcccagacgacgtaagacttgggtaaccatgctttttgcaataatggaacctaacgctgtcggtgccatcatacagccagcaataaacgcctgataaccaaatcctacctgtaacatcaatggcataaggaacggtacacagccggtccccagacgggttgcaatattgcctacgataccgatgctgaaagtgcgggttttaaataaatctaaactaattaatgggtttggcgtgcgtcgtgcatggagaatatagagaagcagtaacccgatgctggtgacaattaccgtcaaggcaatccagctggcgacaatcttttccccgaatagctctattccgctactgaagagaacaaggctgaggccaaacagcaaaaagccagtgatatcgaatctgcgtcgtgcggtggtgaaattgggcatatgtttgcgcgcgtaaagaaggcccgcaatacctatggggatattgattaaaaatatccagtgccaggttgcccaggtgaccagcacgccgccaagaacggggcctaaaattggccccaccagacccggcatggcgacaaaattcaatactggaagaagttcattacgaggataagcgcgcagtaaggccagccgagcaacaggcatcatcattgcgccgcctatcccctgaataacccggaagacaaccagctgtggtaggctattagaaagtgcgcaggccagagaacccaatgtgaacagactcacggcaagggtaaaaatgcgacgcgtaccgaagcgatcggctagccatccgcttaccggaataagcatcgccaccgtcagcgtataactgatgatggcactttgcatcgcgagaggagaacgattaaggctatgagcgattgcgggtaaggcggtattaagaatagtggcatcaagtgcctgcatgaagaaggccatcgccgcgatccacggcaaacccgccatactgcgcttctttttatcgctcattcaatgtcctgttatcgggttatcacttatcaggactgcgtagcagcgcctgacaagctttaaatgccgcgtcgccatcgctttggataatcgcatcgacaatcgcctgatgcagatccagctttatcactgtgtcgctggtaatactcgtgaagtaagtgtgataaacgctatggaataggctggcgaaactggtcaaaaacggattggcgctcatttcatagatatgctcatgccaggccatatcgacttcgatccagcgttcacggcgaaagttctcttttaatgccgccatttcggccattaacgtattgagatgcgctttctgttccgcggtgccaaccgttgctgccagtaggcaggcttgcggctccagacagatacgcataaccagaaagtgatcgatgacctgatgaaagttctcttctgtcatccaccaggtaagcaattcctgatcaagaaaattccagttgctttgtggcatgacccgagtaccaattcgcggtcgcggtaaaaccatcccttttgccgttaacgttttgaccgcttcgcgtaccgctgtacgactcactccaaattgctcgcccagctcaatctcaccgggcaaaatggtgccgggttcatattcaccttttaagatccgttgcgccagcttctcagccagaacatagctaaggtttttctgtgcagctaactgttgtgcgcttaaaggcattacttatcttcctttttctttttattcctccttagtatgccaccaggaagtgtgattacggttgcaaaaacggcaaattgcttgttttatggcacattaacggggcttttgctgaaaaaatgcgcggtcagaaaattattttaaatttcctcttgtcaggccggaataactccctataatgcgccaccactgacacggaacaacggcaaacacgccgccgggtcagcggggttctcctgagaactccggcagagaaagcaaaaataaatgcttgactctgtagcgggaaggcgtattatgcacaccccgcgccgctgagaaaaagcgaagcggcactgctctttaacaatttatcagacaatctgtgtgggcactcgaagatacggattcttaacgtcgcaagacgaaaaatgaataccaagtctcaagagtgaacacgtaattcattacgaagtttaattctttgagcatcaaacttttaaattgaagagtttgatcatggctcagattgaacgctggcggcaggcctaacacatgcaagtcgaacggtaacaggaaacagcttgctgtttcgctgacgagtggcggacgggtgagtaatgtctgggaaactgcctgatggagggggataactactggaaacggtagctaataccgcataacgtcgcaagaccaaagagggggaccttcgggcctcttgccatcagatgtgcccagatgggattagctagtaggtggggtaacggctcacctaggcgacgatccctagctggtctgagaggatgaccagccacactggaactgagacacggtccagactcctacgggaggcagcagtggggaatattgcacaatgggcgcaagcctgatgcagccatgccgcgtgtatgaagaaggccttcgggttgtaaagtactttcagcggggaggaagggagtaaagttaatacctttgctcattaacgttacccgcagaagaagcatcggctaactccgtgccagcagccgcggtaatacggagggtgcaagcgttaatcggaattactgggcgtaaagcgcacgcaggcggtttgttaagtcagatgtgaaatccccgggctcaacctgggaactgcatctgatactggcaagcttgagtctcgtagaggggggtagaattccaggtgtagcggtgaaatgcgtagagatctggaggaataccggtggcgaaggcggccccctggacgaagactgacgctcaggtgcgaaagcgtggggagcaaacaggattagataccctggtagtccacgccgtaaacgatgtcgacttggaggttgtgcccttgaggcgtggcttccggagctaacgcgttaagtcgaccgcctggggagtacggccgcaaggttaaaactcaaatgaattgacgggggcccgcacaagcggtggagcatgtggtttaattcgatgcaacgcgaagaaccttacctggtcttgacatccacggaagttttcagagatgagaatgtgccttcgggaaccgtgagacaggtgctgcatggctgtcgtcagctcgtgttgtgaaatgttgggttaagtcccgcaacgagcgcaacccttatcctttgttgccagcggtccggccgggaactcaaaggagactgccagtgataaactggaggaaggtggggatgacgtcaagtcatcatggcccttacgaccagggctacacacgtgctacaatggcgcatacaaagagaagcgacctcgcgagagcaagcggacctcataaagtgcgtcgtagtccggattggagtctgcaactcgactccatgaagtcggaatcgctagtaatcgtggatcagaatgccacggtgaatacgttcccgggccttgtacacaccgcccgtcacaccatgggagtgggttgcaaaagaagtaggtagcttaaccttcgggagggcgcttaccactttgtgattcatgactggggtgaagtcgtaacaaggtaaccgtaggggaacctgcggttggatcacctccttaccttaaagaagcgttctttgcagtgctcacacagattgtctgataggaagtgaaaagcaaggcgtcttgcgaagcagactgatacgtccccttcgtctagaggcccaggacaccgccctttcacggcggtaacaggggttcgaatcccctaggggacgccacttgctggtttgtgagtgaaagtcacctgccttaatatctcaaaactcatcttcgggtgatgtttgagatatttgctctttaaaaatctggatcaagctgaaaattgaaacactgaacaacgaaagttgttcgtgagtctctcaaattttcgcaacacgatgatgaatcgaaagaaacatcttcgggttgtgaggttaagcgactaagcgtacacggtggatgccctggcagtcagaggcgatgaaggacgtgctaatctgcgataagcgtcggtaaggtgatatgaaccgttataaccggcgatttccgaatggggaaacccagtgtgtttcgacacactatcattaactgaatccataggttaatgaggcgaaccgggggaactgaaacatctaagtaccccgaggaaaagaaatcaaccgagattcccccagtagcggcgagcgaacggggagcagcccagagcctgaatcagtatgtgtgttagtggaagcgtctggaaaggcgcgcgatacagggtgacagccccgtacacaaaaatgcacatattgtgagctcgatgagtagggcgggacacgtggtatcctgtctgaatatggggggaccatcctccaaggctaaatactcctgactgaccgatagtgaaccagtaccgtgagggaaaggcgaaaagaaccccggcgaggggagtgaaaaagaacctgaaaccgtgtacgtacaagcagtgggagcacgcttaggcgtgtgactgcgtaccttttgtataatgggtcagcgacttatattctgtagcaaggttaaccgaataggggagccgaagggaaaccgagtcttaactgggcgttaagttgcagggtatagacccgaaacccggtgatctagccatgggcaggttgaaggttgggtaacactaactggaggaccgaaccgactaatgttgaaaaattagcggatgacttgtggctgggggtgaaaggccaatcaaaccgggagatagctggttctccccgaaagctatttaggtagcgcctcgtgaattcatctccgggggtagagcactgtttcggcaagggggtcatcccgacttaccaacccgatgcaaactgcgaataccggagaatgttatcacgggagacacacggcgggtgctaacgtccgtcgtgaagagggaaacaacccagaccgccagctaaggtcccaaagtcatggttaagtgggaaacgatgtgggaaggcccagacagccaggatgttggcttagaagcagccatcatttaaagaaagcgtaatagctcactggtcgagtcggcctgcgcggaagatgtaacggggctaaaccatgcaccgaagctgcggcagcgacgcttatgcgttgttgggtaggggagcgttctgtaagcctgcgaaggtgtgctgtgaggcatgctggaggtatcagaagtgcgaatgctgacataagtaacgataaagcgggtgaaaagcccgctcgccggaagaccaagggttcctgtccaacgttaatcggggcagggtgagtcgacccctaaggcgaggccgaaaggcgtagtcgatgggaaacaggttaatattcctgtacttggtgttactgcgaaggggggacggagaaggctatgttggccgggcgacggttgtcccggtttaagcgtgtaggctggttttccaggcaaatccggaaaatcaaggctgaggcgtgatgacgaggcactacggtgctgaagcaacaaatgccctgcttccaggaaaagcctctaagcatcaggtaacatcaaatcgtaccccaaaccgacacaggtggtcaggtagagaataccaaggcgcttgagagaactcgggtgaaggaactaggcaaaatggtgccgtaacttcgggagaaggcacgctgatatgtaggtgaagcgacttgctcgtggagctgaaatcagtcgaagataccagctggctgcaactgtttattaaaaacacagcactgtgcaaacacgaaagtggacgtatacggtgtgacgcctgcccggtgccggaaggttaattgatggggtcagcgcaagcgaagctcttgatcgaagccccggtaaacggcggccgtaactataacggtcctaaggtagcgaaattccttgtcgggtaagttccgacctgcacgaatggcgtaatgatggccaggctgtctccacccgagactcagtgaaattgaactcgctgtgaagatgcagtgtacccgcggcaagacggaaagaccccgtgaacctttactatagcttgacactgaacattgagccttgatgtgtaggataggtgggaggctttgaagtgtggacgccagtctgcatggagccgaccttgaaataccaccctttaatgtttgatgttctaacgtggacccgtgatccgggttgcggacagtgtctggtgggtagtttgactggggcggtctcctcctaaagagtaacggaggagcacgaaggttggctaatcctggtcggacatcaggaggttagtgcaatggcataagccagcttgactgcgagcgtgacggcgcgagcaggtgcgaaagcaggtcatagtgatccggtggttctgaatggaagggccatcgctcaacggataaaaggtactccggggataacaggctgataccgcccaagagttcatatcgacggcggtgtttggcacctcgatgtcggctcatcacatcctggagctgaagtaggtcccaagggtatggctgttcgccatttaaagtggtacgcgagctgggtttagaacgtcgtgagacagttcggtccctatctgccgtgggcgctggagaactgaggggggctgctcctagtacgagaggaccggagtggacgcatcactggtgttcgggttgtcatgccaatggcactgcccggtagctaaatgcggaagagataagtgctgaaagcatctaagcacgaaacttgccccgagatgagttctccctgactccttgagagtcctgaaggaacgttgaagacgacgacgttgataggccgggtgtgtaagcgcagcgatgcgttgagctaaccggtactaatgaaccgtgaggcttaaccttacaacgccgaagatgttttggcggatgagagaagattttcagcctgatacagattaaatcagaacgcagaagcggtctgatgaaacagaatttgcctggcggccgtagcgcggtggtcccacctgaccccatgccgaactcagaagtgaaacgccgtagcgccgatggtagtgtggggtctccccatgcgagagtagggaactgccaggcatcaaattaagcagtaagccggtcataaaaccggtggttgtaaaagaattcggtggagcggtagttcagtcggttagaatacctgcctgtcacgcagggggtcgcgggttcgagtcccgtccgttccgccaccctaattaggggcgtagttcaattggtagagcaccggtctccaaaaccgggtgttgggagttcgagtctctccgcccctgccagaaatcatccttagcgaaagctaaggattttttttatctgaaataaccctctccgaagtaaatccttctaccggcatccttgccagccattcatattaatacacttcatccagcacgttaattttcaaaagatcgcgaatcaacgcatttttatcgctattttgcagccatatggcataaagcggccgactaagtgttgtgctatcgacaacggtatgcaggccgccttttttacgcgcccagctgacgggtagccaggtgcaaccattaagcatcgcaatctgttgctgtgccagttcagcagaactggttgtcagaatgggcacttcgtcagcaccgatcaaacctgcctcatgctgttgaaaatctggcccccactcaagtcgcagataattaagatctccctttagtttactaggggcactggtataaagcgctaaagtgaaatatcccagcaactgactactaaattcgtccattttgggcgcttcagtggtaataagaagatcaagctggcgttcatgcagctgttttaccagagactgccgttgggcaattcgcgcttcgaactgtaagcctgtatgggcatcctgattttgatacaagcgtcccagccactgattaagcatacattcccacaagctggcgctggcaccgatagaaaactcgttatgtcgactggtatgcgccacctccttacgggcggcctgccaggtgctcatgagcgtttctgcataaggcagtagtttttcaccggcagcggttaaacggatattgtttctgtggcgggtgaaaaggttcacacccagttgattttccagttgtctgattcgaaagctcactgcactctgggtcagatagaggctttcagccgctcgaccaaagtgacgcgttcggctaacttccaggaaagtttttaacaattccgtatccacagtgctctccgcaaaattatttgtcgttatgatttaaatgttttgttttacactctgtcaagcgtaactaatactccgcgccataactagctcggtcaaagaattaggagcgtgcaggatggcggaaagctttacgacgactaatcgatatttcgacaataaacattatccacgtggattctctcgtcatggtgatttcaccatcaaagaggcacaactgcttgagcgtcatggttatgccttcaatgagttggatcttggcaaacgcgagccggttaccgaggaagagaaactcttcgtagcagtatgccgtggcgaacgtgagccagtgacagaagcagaacgcgtgtggtccaagtatatgacgcgtattaagcgtccaaaacgttttcacaccctttccggcggtaaaccgcaggttgaaggtgctgaagactacaccgattctgacgattaataaaaagggcgaaatgccctttttttatgtcagtagtttctgcagatggatgagcaaacggtcaatcgctcgatagctaactgcctcctgcaaatgctgacgtgtgataatgtcagactgatcaatatcagcaatggttcgtgcaactttcaataaccgctgccaggcacgaatgcttaaccccagatggatcagtgttccttccaaccacatcgcatcttcgctctcaagtttgcagaattggcgtatttccggactatccagccaggcattcagtttattctgccgcttaaattggcgctctctggcggccattacgcgttgtttaacggtggcgctgctttctcccggcactaccgttttactcaaaatgccggggggtggtaatgggatctccagactgagatcgaagcggtcgagaaagggcccgctgagccggttgagataacgtaatgtctgttctggcgtgcagcggttatggtttccctgataatgtccggtagggctgggattcatcgccgcaacaagctggaaacgggctggataggttatttttgctcgtgtgcgactaagatggatctgcccggattcaatcggctctcgcaaggcatccagtgtacgccgttcaaattcaggtagctcatcaagaaaaagcacgccgttatgcgccaggctaatttcaccgggccctggaattgcgccaccgcctaccatcgcagttaagcttgcactgtgatgaggactgcggaacgggcgctgccgccattgtttttgtacactttcagcatttaccagacttaatatcgcagcactctccagtgcctcttcattgcttaaatctggcaacaggccattaatacggctggcgagcattgttttacctgttcccggcggcccaatcagtaaaaggttgtgcccgccagcagcggtaatttccagtcctcgctttccttgttcctgaccgataacatcactgagatcatgttgtagcgcccgggatactgcatcagttggtttcgggcgttcgagagcgtgcttaccttccagaaacgcacagacagcttgcagatgatcggctatcaggcatccttcaccgttaattagccccacttcatcttcgttatctttcgcgacgataatttttctgccgctcttaatagcttcagttgcactggagattgcgccgggaacgccacgcagagcgcctgtaagcgccagttctccgactaattcatattcatctaacttattggctgtaagctgttcactggccgccagcaacgcaatggcgataggtaaatcatatcgtcccccttcttttggcagatcagctggagccaggttgatggtgatttttttcgccggatattcatatccgctattgataatggcgctgcgcacgcgatcgcgagcttcttttaccgttgtttctggtaagcccaccatcgttaagccgggtagacctttactgatatgtacctcaacagtgatcgggggcgcatttactcccagggctgcgcgggtatgaacaatactcagactcataagccctccttgagtcaccattatgtgcataagatatcgctgctgtagcccgctaattcgtgaattttagtggctgattcctgtttatttgtgcaagtgaagttgagttgttctggcggtggaatgatgctcgcaaaaatgcagcggacaaaggatgaactacgaggaagggaacaacattcatactgaaattgaatttttttcactcactattttatttttaaaaaacaacaatttatattgaaattattaaacgcatcataaaaatcggccaaaaaatatcttgtactatttacaaaacctatggtaactctttaggcattccttcgaacaagatgcaagaaaagacaaaatgacagcccttctacgagtgattagcctggtcgtgattagcgtggtggtgattattatcccaccgtgcggggctgcacttggacgaggaaaggcttaaagatcaagccttaacgaactaagacccccgcaccgaaaggtccgggggttttttttgaccttaaaaacataaccgaggagcagacaatgaataacagcacaaaattctgtttctcaagattcaggacggggaactaactatgaatggcgcacagtgggtggtacatgcgttgcgggcacagggtgtgaacaccgttttcggttatccgggtggcgcaattatgccggtttacgatgcattgtatgacggcggcgtggagcacttgctatgccgacatgagcagggtgcggcaatggcggctatcggttatgctcgtgctaccggcaaaactggcgtatgtatcgccacgtctggtccgggcgcaaccaacctgataaccgggcttgcggacgcactgttagattccatccctgttgttgccatcaccggtcaagtgtccgcaccgtttatcggcactgacgcatttcaggaagtggatgtcctgggattgtcgttagcctgtaccaagcacagctttctggtgcagtcgctggaagagttgccgcgcatcatggctgaagcattcgacgttgcctgctcaggtcgtcctggtccggttctggtcgatatcccaaaagatatccagttagccagcggtgacctggaaccgtggttcaccaccgttgaaaacgaagtgactttcccacatgccgaagttgagcaagcgcgccagatgctggcaaaagcgcaaaaaccgatgctgtacgttggcggtggcgtgggtatggcgcaggcagttccggctttgcgtgaatttctcgctgccacaaaaatgcctgccacctgtacgctgaaagggctgggcgcagtagaagcagattatccgtactatctgggcatgctggggatgcacggcaccaaagcggcaaacttcgcggtgcaggagtgtgacctgctgatcgccgtgggcgcacgttttgatgaccgggtgaccggcaaactgaacaccttcgcgccacacgccagtgttatccatatggatatcgacccggcagaaatgaacaagctgcgtcaggcacatgtggcattacaaggtgatttaaatgctctgttaccagcattacagcagccgttaaatcaatgactggcagcaacactgcgcgcagctgcgtgatgaacattcctggcgttacgaccatcccggtgacgctatctacgcgccgttgttgttaaaacaactgtcggatcgtaaacctgcggattgcgtcgtgaccacagatgtggggcagcaccagatgtgggctgcgcagcacatcgcccacactcgcccggaaaatttcatcacctccagcggtttaggtaccatgggttttggtttaccggcggcggttggcgcacaagtcgcgcgaccgaacgataccgttgtctgtatctccggtgacggctctttcatgatgaatgtgcaagagctgggcaccgtaaaacgcaagcagttaccgttgaaaatcgtcttactcgataaccaacggttagggatggttcgacaatggcagcaactgttttttcaggaacgatacagcgaaaccacccttactgataaccccgatttcctcatgttagccagcgccttcggcatccatggccaacacatcacccggaaagaccaggttgaagcggcactcgacaccatgctgaacagtgatgggccatacctgcttcatgtctcaatcgacgaacttgagaacgtctggccgctggtgccgcctggcgccagtaattcagaaatgttggagaaattatcatgatgcaacatcaggtcaatgtaagcgctcgcttcaatccagaaaccttagaacgtgttttacgcgtggtgcgtcatcgtggtttccacgtctgcagtatgaatatggccgccgccagcgatgcacaaaatataaatatcgaattgaccgttgccagcccacggagcgtcgacttactgtttagtcagttaaataaactggtggacgtcgcacacgttgccatctgccagagcacaaccacaagtcaacaaatccgcgcctgagcgcaaaaggaatataaaaatgaccacgaagaaagctgattacatttggttcaatggggagatggttcgctgggaagacgcgaaggtgcatgtgatgagccacgcgctgcactatggcactagcgtttttgaaggcatccgttgctacgacagccacaaaggaccggttgtattccgccatcgtgagcatatgcagcgtctgcatgactccgccaaaatctatcgcttcccggttagccagagcattgatgagctgatggaagcttgtcgtgacgtgatccgcaaaaacaatctcaccagcgcctatatccgtccgctgatcttcgtcggtgatgttggcatgggagtaaacccgccagcgggatacagtaccgacgtgattatcgctgctttcccgtggggagcgtatctgggcgcagaagcgctggagcaggggatcgatgcgatggtttcctcctggaaccgcgcagcaccaaacaccatcccgacggcggcaaaagccggtggtaactacctctcttccctgctggtgggtagcgaagcgcgccgccacggttatcaggaaggtatcgcgctggatgtgaacggttatatctctgaaggcgcaggcgaaaacctgtttgaagtgaaagatggtgtgctgttcaccccaccgttcacctcctccgcgctgccgggtattacccgtgatgccatcatcaaactggcgaaagagctgggaattgaagtacgtgagcaggtgctgagccgcgaatccctgtacctggcggatgaagtgtttatgtccggtacggcggcagaaatcacgccagtgcgcagcgtagacggtattcaggttggcgaaggccgttgtggcccggttaccaaacgcattcagcaagccttcttcggcctcttcactggcgaaaccgaagataaatggggctggttagatcaagttaatcaataaatacaaaaaatgggacggcacgcaccgtcccatttacgagacagacactgggagtaaataaagtatgcctaagtaccgttccgccaccaccactcatggtcgtaatatggcgggtgctcgtgcgctgtggcgcgccaccggaatgaccgacgccgatttcggtaagccgattatcgcggttgtgaacagcttcacccaatttgtaccgggtcacgtccatctgcgcgatctcggtaaactggtcgccgaacaaattgaagcggctggcggcgttgccaaagagttcaacaccattgcggtggatgatgggattgccatgggccacggggggatgctttatagtctgccatctcgcgaactgatcgctgattccgttgagtatatggtcaacgcccactgcgccgacgccatggtctgcatctctaactgcgacaaaatcaccccggggatgctgatggcttccctgcgcctgaatattccggtgatctttgtttccggcggcccgatggaggccgggaaaaccaaactttccgatcagatcatcaagctcgatctggttgatgcgatgatccagggcgcagacccgaaagtatctgactcccagagcgatcaggttgaacgttccgcgtgtccgacctgcggttcctgctccgggatgtttaccgctaacagtatgaactgcctgaccgaagcgctgggcctgagccagccgggcaacggcagcctgctggcaacccacgccgaccgtaagcagctgttccttaatgctggtaaacgcattgttgaattgaccaaacgttattacgagcaaaacgacgaaagtgcactgccgcgtaatatcgccagtaaggcggcgtttgaaaacgccatgacgctggatatcgcgatgggtggaagcactaacaccgtacttcacctgctggcggcggcgcaggaagcggaaatcgacttcaccatgagtgatatcgataagctttcccgcaaggttccacagctgtgtaaagttgcgccgagcacccagaaataccatatggaagatgttcaccgtgctggtggtgttatcggtattctcggcgaactggatcgcgcggggttactgaaccgtgatgtgaaaaacgtacttggcctgacgttgccgcaaacgctggaacaatacgacgttatgctgacccaggatgacgcggtaaaaaatatgttccgcgcaggtcctgcaggcattcgtaccacacaggcattcagccaagattgccgttgggatacgctggacgacgatcgcgccaatggctgtatccgcagcctggaacacgcctacagcaaagacggcggcctggcggtgctctacggtaactttgcggaaaacggctgcatcgtgaaaacggcaggcgtcgatgacagcatcctcaaattcaccggcccggcgaaagtgtacgaaagccaggacgatgcggtagaagcgattctcggcggtaaagttgtcgccggagatgtggtagtaattcgctatgaaggcccgaaaggcggtccggggatgcaggaaatgctctacccaaccagcttcctgaaaagtatgggtctcggcaaagcctgtgcgctgatcaccgacggtcgtttctctggtggcacctctggtctttccatcggccacgtcagtccggaagcggcaagcggcggcagcattggcctgattgaagatggtgacctgatcgctatcgacatcccgaaccgtggcattcagttacaggtaagcgatgccgaactggcggcgcgtcgtgaagcgcaggacgctcgaggtgacaaagcctggacgccgaaaaatcgtgaacgtcaggtctcctttgccctgcgtgcttatgccagcctggcaaccagcgccgacaaaggcgcggtgcgcgataaaagcaaactggggggttaataatggctgacagccaacccctgtccggtgctccggaaggtgccgaatatttaagagcagtgctgcgcgcgccggtttacgaggcggcgcaggttacgccgctacaaaaaatggaaaaactgagcagccgtcttgataacgtcattctggtgaagcgcgaagatcgccagccagtgcacagctttaagctgcgcggcgcatacgccatgatggcgggcctgacggaagaacagaaagcgcacggcgtgatcactgcttctgcgggtaaccacgcgcagggcgtcgcgttttcttctgcgcggttaggcgtgaaggccctgatcgttatgccaaccgccaccgccgacatcaaagtcgacgcggtgcgcggcttcggcggcgaagtgctgctccacggcgcgaactttgatgaagcgaaagccaaagcgatcgaactgagtcagcagcaggggttcacctgggtgccgccgttcgaccatccgatggtgattgccgggcaaggcacgctggcgctggaactgctccagcaggacgcccatctcgaccgcgtatttgtgccagtcggcggcggcggtctggctgctggcgtggcggtgctgatcaaacaactgatgccgcaaatcaaagtgatcgccgtagaagcggaagactccgcctgcctgaaagcagcgctggatgcgggtcatccggttgatctgccgcgcgtagggctatttgctgaaggcgtagcggtaaaacgcatcggtgacgaaaccttccgtttatgccaggagtatctcgacgacatcatcaccgtcgatagcgatgcgatctgtgcggcgatgaaggatttattcgaagatgtgcgcgcggtggcggaaccctctggcgcgctggcgctggcgggaatgaaaaaatatatcgccctgcacaacattcgcggcgaacggctggcgcatattctttccggtgccaacgtgaacttccacggcctgcgctacgtcagtgaacgctgcgaactgggcgaacagcgtgaagcgttgttggcggtgaccattccggaagaaaaaggcagcttcctcaaattctgccaactgcttggcgggcgtagcgtcaccgagttcaactaccgttttgccgatgccaaaaacgcctgcatctttgtcggtgtgcgcctgagccgcggcctcgaagagcgcaaagaaattttgcagatgctcaacgacggcggctacagcgtggttgatctctccgacgacgaaatggcgaagctacacgtgcgctatatggtcggcggacgtccaagccatccgttgcaggaacgcctctacagcttcgaattcccggaaagtccgggcgcgctgctgcgcttcctcaacacgctgggtacgtactggaacatttctttgttccactatcgcagccatggcaccgactacgggcgcgtactggcggcgttcgaacttggcgaccatgaaccggatttcgaaacccggctgaatgagctgggctacgattgccacgacgaaaccaataacccggcgttcaggttctttttggcgggttaaggaaaaatgcctgatagcgcttcgcttatcaggcctacccgcgcgacaacgtcatttgtggttcggcaaaatcttccagaatgcctcaattagcggctcatgtagccgctttttctgcgcacacacgcccagctcaaacggcgttttctcatcgctgcgctctaaaatcatcacgcggttacgcaccggttcggggctgttttccagcaccacttccggcaacaatgccacgccacagccgagtgccaccatgcttaccatcgcttcatgcccgccaaccgtggcgtaaatcatcgggttactgattttattgcgtcgaaaccacagttcaatgcggcggcgtaccggcccctgatcggccataataaacggcaccgtactccagtccggcttctctacgctcacctgattacgcaccgggcagggcagcgcgggggcaatcagcactactgccagattctccagcatgctaaacgccactgcgccgggcaaggtttccggtttacccgcaatcgccagatccgcttcaccagtgaccaccttttccatcgcatctgccgcatcaccagtagtaagtttaatctccacgctcgggtgttccgcgcggaagcgatccagaatcggcggcagatggctgtaggcagcggtcacgctgcagaagatatgtaattcgccagagaggctcggcccttgctgatcgatggtgtggcgcaactgctgatactgcaacagcgtttgctgggcgaaaacgcgcagctcttcgcccgcttcagtcagcgtcaccgtgcggttatcgcgcacaaacagcggctgaccgagatcttcttccaggcgctgaatctgccgactgagcgtggatgggctaacgtgcatcgcccgcgcgctgcggccaaaatggcggctttccgccagatgcaggaaggttttcagatcgcgtaaatccacagggacagccctcgatgttgacgttgcaaaaattgcaatgtgacgttgtgaatatatcaatttccgcaataaatttcctgtcatatagtgaattcaatctcgcaaacgcgaaccgaacaataagaagcacaacatcacgaggaatcaccatggctaactacttcaatacactgaatctgcgccagcagctggcacagctgggcaaatgtcgctttatgggccgcgatgaattcgccgatggcgcgagctaccttcagggtaaaaaagtagtcatcgtcggctgtggcgcacagggtctgaaccagggcctgaacatgcgtgattctggtctcgatatctcctacgctctgcgtaaagaagcgattgccgagaagcgcgcgtcctggcgtaaagcgaccgaaaatggttttaaagtgggtacttacgaagaactgatcccacaggcggatctggtgattaacctgacgccggacaagcagcactctgatgtagtgcgcaccgtacagccactgatgaaagacggcgcggcgctgggctacagccacggtttcaacatcgtcgaagtgggcgagcagatccgtaaagatatcaccgtagtgatggttgcgccgaaatgcccaggcaccgaagtgcgtgaagagtacaaacgtgggttcggcgtaccgacgctgattgccgttcacccggaaaacgatccgaaaggcgaaggcatggcgattgccaaagcctgggcggctgcaaccggtggtcaccgtgcgggtgtgctggaaagctccttcgttgcggaagtgaaatctgacctgatgggcgagcaaaccatcctgtgcggtatgttgcaggctggctctctgctgtgcttcgacaagctggtggaagaaggtaccgatccagcatacgcagaaaaactgattcagttcggttgggaaaccatcaccgaagcactgaaacagggcggcatcaccctgatgatggaccgtctctctaacccggcgaaactgcgtgcttatgcgctttctgaacagctgaaagagatcatggcacccctgttccagaaacatatggacgacatcatctccggcgaattctcttccggtatgatggcggactgggccaacgatgataagaaactgctgacctggcgtgaagagaccggcaaaaccgcgtttgaaaccgcgccgcagtatgaaggcaaaatcggcgagcaggagtacttcgataaaggcgtactgatgattgcgatggtgaaagcgggcgttgaactggcgttcgaaaccatggtcgattccggcatcattgaagagtctgcatattatgaaagtctgcacgagctgccgctgattgccaacaccatcgcccgtaagcgtctgtacgaaatgaacgtggttatctctgataccgctgagtacggtaactatctgttctcttacgcttgtgtgccgttgctgaaaccgtttatggcagagctgcaaccgggcgacctgggtaaagctattccggaaggcgcggtagataacgggcaactgcgtgatgtgaacgaagcgattcgcagccatgcgattgagcaggtaggtaagaaactgcgcggctatatgacagatatgaaacgtattgctgttgcgggttaagtgcgcgctgatgccctcaccccgaccctctcccacagggagagggagaaaacactcaaggccttctcctggagaaggccttgctattagttgcggtacagcaccttaatgatgtgatatccgaactgggtgtgcagcgggccggtcggctccagtaccggacaagagaaaaccactttatcgaacgccggaaccatctgaccctggcggaattcacctaaatcaccgccgcgtttgccacttgggcaaatggagtgtttcttcgccagcttgccgaaatcggccccgttcttaatctgctcgagaagatccagagccagtttctcttcttttacaaggatatgcagtgctgctgctgtttttgccatgatcgtgccttgagtgaataattgtcaggcggcgattttagcatgatccgcagatgctaacgtaattgtcagtcagggagtggctggtacatatatggcaaaagcccggaaaatccgggcttcgcaggtccctcaaggggagaaaacttagggcctctatgggctacaaagtcattatcggggatggttattttattgtcaatttatgaggcttatggcattgatactcttgatgaccgccctctgtatgtctgcaaccaactcatgtggcaaacattgattaagataccctctgtaagtccttgctctgtttaatctgtttcgactgacttgttgtaccaggtcggctttggcccaacgaatctgctgatcaaagaattgcaggtcattgataacattactggctatttcaacatgcattccacgttttaacttgtctggtcggctgtggttgataatggaacgacgatgcatgcgttgccattaatttttccgttgagcacgacaactaacctgttttttatcatttcaggaggaatgcggccatcgtaatacgtcgtgctgaacggtccattttggctaacaggatagttaccaaagttgcattccagtatttcaccaaccttagggctgaaattaatcgccacgagtaaacctctccttagtaaactctgaaaaagtaataacacaacgttacgacccgatattttctaagtctaatggattcacgatgaactccgatttcggtcttctctctctgatttaaacatccgcagccaaccggttagcggcttacacgcggtcacattcaaatgcgattctgctacaatcctccccccgttcgaagattgagcaatacacctatgcgtctaaaccccggccaacaacaagctgtcgaattcgttaccggcccctgcctggtgctggcgggcgcgggttccggtaaaactcgtgttatcaccaataaaatcgcccatctgatccgcggttgcggttatcaggcgcggcacattgcggcggtgacctttactaataaagcagcgcgcgagatgaaagagcgtgtagggcagacgctggggcgcaaagaggcgcgtgggctgatgatctccactttccatacgttggggctggatatcatcaaacgcgagtatgcggcgcttgggatgaaagcgaacttcagcttgtttgacgataccgatcagcttgctttgcttaaagagttgaccgaggggctgattgaagatgacaaagttctcctgcaacaactgattagcaccatctctaactggaagaatgatctcaaaacaccgtcccaggcggcagcaagtgcgattggcgagcgggaccgtatttttgcccattgttatgggctgtatgatgcacacctgaaagcctgtaacgttctcgacttcgatgatctgattttattgccgacgttgctgctgcaacgcaatgaagaagtccgcaagcgctggcagaacaaaattcgctatctgctggtggatgagtatcaggacaccaacaccagccagtatgagctggtgaaactgctggtgggcagccgcgcgcgctttaccgtggtgggtgacgatgaccagagcatctactcctggcgcggtgcacgtccgcaaaacctggtgctgctgagtcaggattttccggcgctgaaggtgattaagcttgagcagaactatcgctcttccgggcgtattctgaaagcggcgaacatcctgatcgccaataacccgcacgtctttgaaaagcgtctgttctccgaactgggttatggcgcggagctaaaagtattaagcgcgaataacgaagaacatgaggctgagcgcgttactggcgagctgatcgcccatcacttcgtcaataaaacgcagtacaaagattacgccattctttatcgcggtaaccatcagagccgggtgtttgaaaaattcctgatgcaaaaccgcatcccgtacaaaatatctggtggtacgagctttttctctcgtcctgaaatcaaggacttgctggcttatctgcgcgtgctgactaacccggacgatgacagcgcatttctgcgtatcgttaacacgccgaagcgagagattggcccggctacgctgaaaaagctgggtgagtgggcgatgacgcgcaataaaagcatgtttaccgccagctttgatatgggcctgagtcagacgcttagcggacgtggttatgaagcattgacccgcttcactcactggttggcagaaatccagcgtctggcggagcgggagccgattgccgcggtgcgtgatctgatccatggcatggattatgaatcctggctgtacgaaacaagccccagcccgaaagccgccgaaatgcgcatgaagaacgtcaaccaactgtttagctggatgacggagatgctggaaggcagtgaactggatgagccgatgacgctcacccaggtggtgacgcgctttactttgcgcgacatgatggagcgtggtgagagtgaagaagagctggatcaggtgcaactgatgactctccacgcgagcaaagggctggagtttccttatgtctacatggtcggtatggaagaagggtttttgccgcaccagagcagcatcgatgaagataatatcgatgaggagcggcggctggcctatgtcggcattacccgcgcccagaaggaattgacctttacgctgtgtaaagaacgccgtcagtacggcgaactggtgcgcccggagccgagccgctttttgctggagctgccgcaggatgatctgatttgggaacaggagcgcaaagtggtcagcgccgaagaacggatgcagaaagggcaaagccatctggcgaatctgaaagcgatgatggcggcaaaacgagggaaataatcaaggccggaaaagatgcgtcagcatcgcatccggcacttactcattaatgcacttccagcggccagtggacatagctctgccactggctttcctgagcaataatctctttacccagcggatgttgggttagccaaccttgcggaagcgtcaaggtcaacagttcatggttagcctgtaatgtcatctctggcacgagatcgtcacggcgacggctggcaaaaatgatggccaggcgtagtaaacggcagagttgttctgcgacgcgcggcggtacggcattttgctgatgcaggctactgagatcgaccggattagtctggttgagcagtagcgtcgccagcaattttttctgtgcgggggtaaaaccgggaagatccagattacgcaccagataagcagcgtgttgcggcgcttgtttgaagtcaacgctcaggccgatttcatgaagctgacaggcgctgatgagcaaatcgcggcttattgcttcaagatgccattcgttttccacctgatcgaagaagttagccgcaactttggctacgcgctgtgcctgatcaatatcgatcataaagcggcgttgaatattacgcagcgtacggctgcgaatatcctgctcgacggccagatgcaacatgccgtagaccaggccttcacgcagcgcaccgcccgccagggtcatacactgaatattcagttcggtaaaaatggcgatcaggatcgccagaccactcgggaacactaacgcacgttccagcgtcagcccgtcaatctccagttcctccagccgaccgcaatgaatggctcgctgtttcaattgctgcaacttttccagggtaatgcgttcatccatcccctgtgccatcatgatttcctgtaacgcctgcacggtgccggaagcaccaacgcacactttccagccgtgataccgtaattcatcggcaaccggacgtaacacttcgcgtgccgctttttctgcagcatcaaaattttcctgccccagattacgatcggcaaaatagcgttccagccaggtgacgcagcccatgctcaggctgaacaagctggtggtttgtgcacccgtgccggttaccagttcagtactggctccgcctatatccaccaccaggcgctgatcggcaccaccagtggtgtgagcaacgccctgataaatcagacgtgcttcctcttcaccgctgatcacctgtaccggacaaccgagaatttcctgcgctttggcaataaaatcacccgcattgacggcaaggcgtaacgtcgccgtagcgacaacgcgaatttggctgggaggaatatcttgcagacgttcagcaaacaggcgcaaacattgccaaccgcgctccattgcttcattggagagggcattttcgctattcaggccagcagccagacgcactttgcgttttattcgcgtcagcgtctggatgcttccagccacctcgcgcacaaccagcatatgaaaactattgctaccgagatcaatggctgcatacaggctgctggtggaacccatactcttcatccttcaatctgtctctgtgttggctgcattctttcacctgaatcacttactacagtaagctcatcgggattcattctcttgccatcttgatacagtttgaatgattttgagtatgacattttttatttaaccactacgacgacgattacgcggagcgccagtacgacgcggaccattgcctgtgcgcgggcgcgtgaggcgcagcggttttggcagatcggtcatcaatgcgtccggattgtatttgcttaccggaatactgtgaccaatataggtctcaatagcaggcaaattcaatgcatactcttcacacgccaggctgatagagtgaccgcttgcgcctgcgcgacctgtacgaccaatacggtgaacgtaatcttcacagtcatcgggtaaatcgtagttaaagacgtgcgtcactgccggaatatgcaaaccacgcgcggcaacgtcggtggcaaccagaatatccagatcgccacgggtaaattcatcaagaatacgcagacgttttttctgcgcgacatcgcctgtcaataaaccgacacgatgaccatctgctgccaggtggccccagatctcttcacaacggtgtttggtgttggcgaaaataatcgctctgtctggccactcttcttcgatcagcgtttgcagcaaacgcattttttcttcgttagaagggtagaaaagctcttctttaatacggtggcccgttttctgttccggttccacttcaatatattcggcattgttcatctgctcgaacgccagttcacgtacccggtagctaagcgtggcggagaacagcatgttgaggcgctggtttgcaggcggcatacggcggaacagccagcggatatctttaataaagcccagatcgtacatgcgatcggcttcgtccagtaccaccacctgaatggcaccgaggttaatgtggttctgcttggcgtagtcaattaaacgccccgtggtgccaatcagaatgtcaacgccgctttccagcactttcagctgtttgtcgtagccatcaccaccgtaagccagacccagcttcaggccagtagcttccgccagcggttctgcgtcggcatggatctgcacggcaagttcacgcgtcggtgccataattaaggcacgcggctgattcaccttgcgatcggcaatcgcaggatgagagagaagataatgaaacgtactcgtaagaaacgccatcgttttcccggtaccggtttgcgcctgcccggctacgtcacgacccgccagcgtcagcggaagggccagtgcctgaatgggcgtacagttatgaaacccttttttttcaagggcttctacaaccttcggatgcagggcgaagtcggaaaacttctgttctgttaaatgtgttttgctcatagtgtggtagaatatcagcttactattgctttacgaaagcgtatccggtgaaataaagtcaacctttagttggttaatgttacaccaacaacgaaaccaacacgccaggcttattcctgtggagttatatatgagcgataaaattattcacctgactgacgacagttttgacacggatgtactcaaagcggacggggcgatcctcgtcgatttctgggcagagtggtgcggtccgtgcaaaatgatcgccccgattctggatgaaatcgctgacgaatatcagggcaaactgaccgttgcaaaactgaacatcgatcaaaaccctggcactgcgccgaaatatggcatccgtggtatcccgactctgctgctgttcaaaaacggtgaagtggcggcaaccaaagtgggtgcactgtctaaaggtcagttgaaagagttcctcgacgctaacctggcgtaagggaatttcatgttcgggtgccccgtcgctaaaaactggacgcccggcgtgagtcatgctaacttagtgttgacttcgtattaaacataccttattaagtttgaatcttgtaatttccaacgcttcccgttttatcttaaatgcgaagtgaacagatttctggcagcagtctcaatccgtcttgtcgtttcagttctgcgtactctcctgtgaccaggcagcgaaaagacatgagtcgatgaccgtaaacaggcatggatgatcctgccataccattcacaacattaagttcgagatttaccccaagtttaagaactcacaccactatgaatcttaccgaattaaagaatacgccggtttctgagctgatcactctcggcgaaaatatggggctggaaaacctggctcgtatgcgtaagcaggacattatttttgccatcctgaagcagcacgcaaagagtggcgaagatatctttggtgatggcgtactggagatattgcaggatggatttggtttcctccgttccgcagacagctcctacctcgccggtcctgatgacatctacgtttcccctagccaaatccgccgtttcaacctccgcactggtgataccatctctggtaagattcgcccgccgaaagaaggtgaacgctattttgcgctgctgaaagttaacgaagttaacttcgacaaacctgaaaacgcccgcaacaaaatcctctttgagaacttaaccccgctgcacgcaaactctcgtctgcgtatggaacgtggtaacggttctactgaagatttaactgctcgcgtactggatctggcaagtcctatcggtcgtggtcagcgtggtctgattgtggcaccgccgaaagccggtaaaaccatgctgctgcagaacattgctcagagcattgcttacaaccacccggattgtgtgctgatggttctgctgatcgacgaacgtccggaagaagtaaccgagatgcagcgtctggtaaaaggtgaagttgttgcttctacctttgacgaacccgcatctcgccacgttcaggttgcggaaatggtgatcgagaaggccaaacgcctggttgagcacaagaaagacgttatcattctgctcgactccatcactcgtctggcgcgcgcttacaacaccgttgttccggcgagtggtaaagtgttgaccggtggtgtggatgccaacgccctgcatcgtccgaaacgcttctttggtgcggcgcgtaacgtggaagagggcggcagcctgaccattatcgcgacggcgcttatcgataccggttctaaaatggacgaagttatctacgaagagtttaaaggtacaggcaacatggaactgcacctctctcgtaagatcgctgaaaaacgcgtcttcccggctatcgactacaaccgttctggtacccgtaaagaagagctgctcacgactcaggaagaactgcagaaaatgtggatcctgcgcaaaatcattcacccgatgggcgaaatcgatgcaatggaattcctcattaataaactggcaatgaccaagaccaatgacgatttcttcgaaatgatgaaacgcagttaaatttgtcttatgccaaaaacgccacgtgtttacgtggcgttttgcttttatatctgtaatcttaatgccgcgctggcgatgttaggaaaattcctggaatttgctggcatgttatgcaatttgcatatcaaatggttaatttttgcacaggactggtgggtttggaacggactttcccttctgaataaaggtcttcgtggttatacttctgctaataattttctctgagagcatgcattgtgaatttactgacagtgagtactgatctcatcagtatttttttattcacgacactgtttctgttttttgcccgtaaggtggcaaaaaaagtcggtttagtggataaaccaaacttccgcaaacgtcaccagggattgatacctctcgttggggggattagcgtttacgcagggatttgcttcacgttcggaattgtcgattactatattccgcatgcatctctctatctcgcttgtgccggtgtgcttgttttcattggcgcgctggatgaccgttttgatatcagcgtaaaaatccgtgccaccatacaggccgctgttggcattgttatgatggtgttcggcaagctttatctcagtagcctgggttatatctttggctcctgggagatggtgctcggaccgtttggttacttcctgacgctatttgccgtctgggcggccattaatgcgttcaacatggttgatggcattgatggcttgctgggcgggttgtcctgcgtcagctttgcagcaatcggtatgattttgtggttcgacgggcaaaccagcctcgcaatctggtgctttgcgatgatcgccgccatcctgccatacatcatgcttaaccttggtatcctgggtcgccgctacaaagtctttatgggtgatgcgggcagtacgctgattggttttaccgttatctggatcctgctcgaaacgacccagggcaaaacccatcccatcagcccggttaccgctttgtggataatcgccattccgctaatggatatggtggcgattatgtaccgtcgcctgcgtaaaggcatgagcccattctctcctgaccgtcagcatattcaccatttgatcatgcgtgccgggtttacttcccgtcaggcgtttgtgctgattacccttgccgcagcactgctcgcttccattggcgtgctggcagaatattctcattttgtcccggagtgggtcatgctggtgctctttttgctagcattcttcctctatggatattgcattaagcgtgcctggaaagttgctcgctttattaagcgcgtaaaacgcagactgcgtagaaatcgtggtggcagccccaatttaaccaaataaatgaggatgtgatgacacaaccaatgcctgggaaaccggccgaagacgctgaaaatgaactggatattcgtgggttgtttcgtaccttgtgggctgggaagctatggattattggcatggggctggcgtttgcgttaatcgcgctggcgtatacgttttttgctcgtcaggagtggagcagcacggcgattaccgatcgtccaacggtgaatatgctggggggatattacagccagcagcaatttttgcgtaacctggatgtccgtagtaacatggcttctgccgaccaaccaagcgtcatggacgaagcctataaagagtttgttatgcaactggccagctgggatacccgcagagagttctggctgcaaaccgactattacaaacagcggatggtgggcaacagcaaagccgatgcggcgttgctggatgaaatgattaacaacatccagtttatccccggagactttacccgcgcggtcaatgacagcgtgaagcttattgccgaaaccgcgcctgacgctaataacctgttacgtcagtatgttgcttttgccagccagcgtgcagccagccatctgaatgatgagctgaaaggcgcatgggcggcgcgtaccatccagatgaaagctcaggtgaagcgtcaggaagaggtggcgaaagccatctacgaccgccggatgaacagcattgagcaggcgctgaaaattgctgagcagcataatattagccgcagtgcgacagatgtacctgccgaggaattacctgatagtgaaatgttcctgcttgggcgtccaatgcttcaggctcgactggaaaatttacaggccgtcggtccggcctttgatctcgactatgatcagaatcgggccatgttaaacaccctgaatgttggtccaaccctggatccgcgttttcagacctatcgctatttgcgtacgccggaagaaccggtaaaacgcgatagcccacgtcgtgccttcctgatgattatgtggggcattgtcggggggctgatcggggctggtgtcgcattaacccgccgttgcagcaaataacaacactgctgcggtgagcgcaaaggcgctcgccgcttattcgaagagaatcgatgtgaaagtactgactgtatttggtacgcgcccggaagccatcaagatggcgccgttggtgcatgcgttggcaaaagatcctttttttgaggctaaagtttgcgtcactgcgcagcatcgggagatgctcgatcaggtgctgaaactcttttccattgtacctgactacgatctcaacataatgcagccaggacagggcctgacagagataacctgtcggattctggaagggctaaaacctattcttgccgagttcaaaccagacgtcgtgctggttcacggcgatacgacgacgacgctggcaaccagcctggcggcgttttatcagcgtattcctgttggtcacgttgaggctggtctgcgcacgggcgatctctatagcccgtggccggaagaggctaaccgtacattgaccgggcatctggcgatgtatcacttctctccaaccgaaacttcccggcaaaacttgctgcgtgaaaacgttgcggatagccgaatcttcattaccggtaatacagtcattgatgcactgttatgggtgcgtgaccaggtgatgagcagcgacaagctgcgtagtgaactggcggcaaattacccgtttatcgaccccgataaaaagatgattctggtgaccggtcacaggcgtgagagtttcggtcgtggctttgaagaaatctgccacgcgctggcagacatcgccaccacgcaccaggacatccagattgtctatccggtgcatctcaacccgaacgtcagagaaccggtcaatcgcattctggggcatgtgaaaaatgtcattctgatcgatccccaggagtatttaccgtttgtctggctgatgaaccacgcctggctgattttgaccgacagtggcggcattcaggaagaagcgcctagcctggggaaacctgtgctggtgatgcgcgataccactgagcgtccggaagcggtgacggcgggtacggtgcgtctggtaggcacggataagcagcgaattgtcgaggaagtgacgcgtcttttaaaagacgaaaacgaatatcaagctatgagccgcgcccataacccgtatggtgatggtcaggcatgctctcgcattctggaagcgttaaaaaataatcggataagtctatgagttttgcgaccatttctgttatcggactgggttatatcgggctgccaacggcagcagcgtttgccagtcggcaaaaacaggtaattggtgtcgatatcaaccaacatgcggttgataccatcaatcgtggcgaaatccatatcgtcgaacctgatttggcgagtgtagtaaaaactgccgtagaaggcggttttttacgagcgagcacgacgccagttgaagcggatgcctggctgattgctgtacccacgccgtttaagggcgatcatgagccagatatgacctacgttgaaagcgctgctcgctccattgcgccagtgctgaaaaaaggcgcgctggtgatccttgaatccaccagcccggtggggagtaccgagaagatggcagaatggttagcagagatgcgtccggatctcactttcccgcagcaggtgggcgagcaggcggacgtcaacattgcttactgcccggaacgcgtgttaccaggacaggtaatggtcgagctgattaaaaacgatcgcgtgattggtggtatgacgccggtttgtagcgcccgcgccagcgaactgtacaaaattttcctcgaaggtgagtgtgtcgtcactaacagccggacggcggaaatgtgtaagctcaccgaaaacagcttccgcgatgtgaatatcgcttttgctaatgaattgagcctgatttgtgccgatcaggggattaacgtctgggaactgattcgcctggcgaatcgtcaccctcgcgttaatattcttcagcctggccctggcgtgggcggtcactgcattgctgttgatccgtggtttatcgtggcacagaacccccagcaggcgcggcttatccgtaccgcgcgcgaagtgaacgatcacaaaccgttctgggttatcgatcaggtgaaagcggcggtggctgattgcctggcggctaccgataaacgcgccagtgaactgaaaatcgcctgctttggtctggcgtttaaaccgaatattgatgacctgcgcgaaagcccggcgatggaaatcgctgaactgatcgcccagtggcatagcggcgaaactctggttgttgagcctaacatccaccagttgccgaaaaaactgaccgggctttgtactctggcgcagcttgacgaggcgctggcaacggcagacgtgctggtgatgctggtcgatcatagtcagttcaaagttatcaatggcgacaatgtccatcagcagtatgtcgtcgatgccaaaggagtctggcgctgatgagaaaaattctgataacaggtggtgccgggtttattggcagcgcgctggtgcgttatatcatcaacgaaacgagcgacgcggtggtagtggtcgataagctgacctacgccggaaacctgatgagcctggcaccggtcgcgcaaagcgagcgctttgcctttgagaaagttgatatctgcgatcgggcagaactggcacgcgtattcactgagcatcagccagactgtgtcatgcatctggcagccgaaagccatgttgaccgttctattgacggcccggcagcgtttattgaaaccaacattgtcgggacttatacattgcttgaagcggcgcgggcttactggaatgcgctgacggaagataaaaaaagtgcgttccgttttcatcatatctccactgacgaagtatatggtgacctgcacagcacggatgatttcttcaccgaaaccacgccgtatgcgccgagcagcccttattccgcgagtaaagccagcagcgaccatctggtgcgcgcctggctgcggacctatggtctgccgacgcttatcaccaactgcagcaataactacggcccttaccactttccggaaaaactgatcccgctgatgatcctcaacgcgctggcgggtaaaagcctgccggtatatggcaacgggcagcaaatccgtgactggctgtatgtggaagatcacgcccgcgcgctgtattgcgtggcgaccaccgggaaagtcggtgaaacctataatattggtggtcacaacgagcgtaagaatctcgatgttgtggaaaccatttgcgagctgctggaagaactggctccgaacaagccgcacggcgtggcgcactatcgtgacctgatcacctttgtcgctgaccgtccggggcatgatctgcgttatgccattgatgctagcaaaattgcccgtgaacttggctggctgccgcaggaaacctttgaaagtggaatgcgtaaaacggttcagtggtatctggctaatgaaagctggtggaagcaggtgcaggacggcagctatcagggcgagcgtttaggtctgaaaggctaattttcagcggaggcaaacatgaaaggtattatcctggcgggcggttccggcacccgattgcatccgattacgcgcggcgtaagcaagcaactgttgccgatttacgataagccaatgatttactatccgctgagcgtgctgatgctggccggtatccgcgaaattctcatcatcactacgccggaagataaaggttatttccagcgcctgctgggcgatggtagtgagttcggtatccagctggaatatgccgaacagcccagcccggacggtctggcgcaggcctttatcatcggtgaaaccttccttaatggtgaaccttcttgtctggtgctgggcgataacatcttcttcggtcagggcttcagtccgaagctgcgtcatgttgcggcgcgcaccgaaggggcgacggtttttggctatcaggtgatggacccggaacgctttggcgtggtggagtttgacgacaatttccgcgctatcagcctggaagaaaagccaaaacagccgaagagtaactgggcggtgaccgggctttatttctacgacagtaaagtcgtggagtacgcaaagcaggtgaagccgagcgagcgtggtgaactggagattacctccatcaaccagatgtacctcgaggcgggcaacctgaccgttgaactgctcgggcgcggatttgcctggctggataccggcactcacgacagcctgattgaagccagcacctttgtacagacggtggaaaaacgccagggctttaagattgcctgcctggaagagattgcctggcgtaacggctggctcgatgacgagggtgtgaagcgtgctgccagtagtttagcgaaaactggctacggccaatatctgctggagttacttcgtgcccgtccgcgccagtattgagccactaacctgggaaaacgccttctttggtgttaacagcgccatcgtgcgcattacgtctgaagcaccgctcctgacgccagacgcgttagcgccgtggtcacgggtgcaggccaaaattgcggcaagtaatacgggtgaactggatgccctgcaacagctgggattctccctggtagaaggtgaagttgatttggcgctacccgtgaacaatgccagtgatagcggtgctgtagtggcacaagagaccgatattcccgcattacgtcagttagccagcgccgcatttgcgcaaagccgttttcgtgcgccgtggtatgcgcctgacgccagcagtcgcttttatgcacagtggattgaaaatgccgtgcgcggcacctttgatcatcaatgtctgattttacgtgcggcgtccggcgatattcgcggctatgtctctttacgggaactcaatgcgacagatgcgcgaattggcctgctggctggacgcggtgcaggtgctgagctgatgcaaacggcgctaaactgggcgtatgctcgcggtaaaacaactttgcgggtggcgacccaaatgggcaacaccgccgcgcttaaacgatacatacaaagtggtgcgaatgtagaaagcaccgcgtactggttatacaggtgatcacatgattccatttaacgcaccgccggtggtgggaaccgaactcgactatatgcagagcgcaatgggtagcggcaaactgtgtggcgatggcggttttacccgtcgctgccagcagtggctggagcaacgttttggcagcgccaaagtgttactgacgccgtcctgcaccgctagcctggagatggcggcgctgctgctcgatatccagcctggcgatgaagtgatcatgccgagctacacctttgtctccaccgccaatgcctttgtgctgcgtggcgcaaaaatcgtttttgtggatgttcgcccggacaccatgaacatcgacgaaacgctgattgaagcggcgatcaccgacaaaacgcgcgttatcgtgccggtccattacgcgggtgtggcctgcgaaatggacaccattatggcgttggcgaaaaagcataatttgtttgtggtagaagatgccgctcagggcgtgatgtccacttacaaagggcgtgcactgggaaccattggtcatattggctgctttagcttccatgaaaccaaaaactacacggcgggcggtgaaggcggcgcgacgctgattaacgataaagcgttaatcgaacgagccgagatcatccgtgaaaagggcactaaccgcagccagttcttccgtggtcaggtcgataaatatacctggcgcgatattggctccagctatttgatgtccgatctgcaagctgcatacctgtgggcgcaactggaagcagcggatcgtatcaaccagcaacgtctggcgctgtggcaaaactactacgatgcgttagcgcctctggcgaaagccgggcgtatcgagctgccgagcattcccgatggctgcgtgcagaacgcgcatatgttctacattaaactgcgggatattgatgaccggagcgcgttgattaactttctgaaagaagcggaaatcatggcggtgtttcattacattccgctgcacggttgccctgcgggggaacactttggtgagttccacggtgaagatcgctacaccaccaaagagagcgagcgcctgctgcgcctgccgctgttctacaacctgagccccgtcaatcagcgtacggtaattgcgactttgttgaactacttttcctgatatgagcttggcaaaagcgtccttgtggacggcggccagtacactggtcaagattggtgccgggttactggtcggtaagttgctggcggtgagttttggtccggcggggcttgggctggcggcaaatttccgccagttgattaccgtgctcggcgtgcttgccggggctggcatctttaacggtgtaaccaaatacgttgcccagtaccatgataatccgcaacagctgcgccgcgtggtcggcactagtagtgcgatggtacttggtttctctacgctgatggcgctggtttttgtgctggcagctgcgccaatcagccagggattgtttggtaataccgactatcaggggctggtgcgtttagtggcgctggtgcaaatggggatcgcctggggcaacctgttactggcgctgatgaaaggctttcgcgatgccgcaggtaatgcgttaagcctgattgtcggcagcttgattggcgttctcgcgtactacgtcagttaccgtttgggcggttatgaaggggcgttgctgggtctggcgctgattcccgcgctggtggtaattcctgccgccatcatgttgatcaaacgtggtgtcatcccgttaagctatctgaaacccagctgggataacggtctggcagggcagttgagcaaatttacgctcatggcgttgattacgagcgtgaccttgcctgttgcttacatcatgatgcgtaaactgctggcggcgcagtatagctgggatgaggtggggatctggcaaggggtgagcagtatttccgatgcctacctgcaatttattacggcaagcttcagcgtatatttgctgcccacgttgagccggctaacggaaaagcgcgatatcacccgggaagtggttaaaagcctgaaattcgtcttaccggcagtggcggcggcgagttttaccgtctggctgctgcgtgattttgctatctggctgctgttgagcaataaatttaccgctatgcgcgatctctttgcctggcagttagtgggtgatgtgttaaaagtgggcgcttatgtctttggttatctggtgatcgccaaagcgagtctgcggttttatattctggcggaagtcagccagttcactttattgatggtatttgcccactggctaatccctgcgcatggtgcactgggcgcggcgcaggcatatatggcaacttatatcgtctatttttctctttgttgtggcgtgtttttactctggcgtaggcgggcatgactgtactgattcacgtactgggaagcgatatccctcaccataaccgaaccgttttgcggtttttcaatgacgcgctggccgcgacgagcgagcacgcgcgcgagtttatggttgttggcaaggacgacggcttaagtgatagctgtccggcgctttctgtgcaatttttccctgggaaaaaaagcctggcggaagcggtcatcgcgaaagcaaaagctaaccgtcagcagcgttttttcttccacggtcagttcaatcccacactgtggctggctctgctgagtggtggcattaagcccagccagtttttctggcatatctggggggcagacctgtatgagctttccagtggcttgagatataagcttttttacccactacgtcgcctggcgcaaaagcgagtcggctgtgtatttgccacccgcggcgatttgagcttttttgccaaaacgcacccaaaggtgcggggcgaactgctgttcttcccgacgcggatggaccctagcctcaatacgatggcgaacgatcggcaacgtgaagggaaaatgaccattctggtggggaactccggcgaccgcagcaatgagcatattgctgccttgcgcgccgttcatcagcaatttggcgatacggtaaaagtggtggtgccgatgggatatccgcctaataacgaagcgtacattgaggaagttcgtcaggcggggctggagttattcagcgaagaaaatctacaaattctgagcgaaaaactggaatttgacgcctatctggcgctacttcgtcagtgcgatcttggttactttatttttgcccgccagcagggcattggtacgctgtgcttactgattcaggcgggcattccttgtgtgcttaaccgggaaaatccgttctggcaggatatgacggaacaacatttgccggtgctgtttactaccgacgatctcaacgaggatattgtgcgtgaagcgcagcgccagttggcgagcgtggataaaaacaccattgccttctttagccctaactatctacaaggctggcagcgggcgttggcgattgccgccagggaggtcgcatgagtctgctgcaattcagtggcctgtttgttgtctggctgctctgcacgctgtttattgccacgctgacctggtttgagtttcgccgtgtgcgctttaacttcaatgtcttctttagtttgctgtttttgctcacctttttcttcggcttcccgctgaccagcgtgctggtatttcgctttgatgttggtgtcgcgccgccagaaatcttgttgcaggcgttgctttctgcgggctgcttctacgcggtttactatgtcacctacaaaacccgcctacgcaaacgcgttgctgatgtaccgcgccgtccgctgtttaccatgaaccgcgtggagaccaatcttacgtgggtgatcctgatgggtatcgcgctggtaagcgtcggcatcttcttcatgcacaacggctttttgctgttccggcttaactcctacagtcagatcttttccagtgaagtctccggcgtggcgttaaaacgcttcttttactttttcatcccggcgatgctggtggtctactttctgcgccaggacagcaaagcgtggctgtttttcctcgtcagcacggtcgcctttggcttgctgacttatatgattgtcggcggcactcgcgccaatatcatcatcgcattcgctatcttcctgtttattggcattattcgcggctggattagcttgtggatgctggcggcggcgggcgtgctggggattgttggcatgttctggctggcactaaaacgctatggaatgaatgtgagcggcgatgaagcgttctatacgtttctctatctcactcgcgacaccttcagcccgtgggagaatctggcgttgctgttgcagaactacgacaacatcgacttccagggcctggctccaattgtccgcgatttctatgtctttatcccttcctggctgtggccgggtcgcccgagtatggtgctgaacagtgccaactactttacctgggaagtgctgaataaccactccggactggcgatcagccctacgcttataggcagtctggtggtgatgggcggcgcgttgttcatcccgctcggggcgatcgtggttggtctgatcatcaaatggttcgactggctgtatgagctgggcaaccgcgagcctaatcgctataaagctgcgatattgcacagtttctgctttggggcgatcttcaatatgatcgtgctggcgcgtgaagggctggatagctttgtcagtcgcgtggtcttttttatcgtggtcttcggcgcatgtctgatgatcgcaaaactgttgtactggctttttgaaagcgccggactcattcataaacgtacaaaaagtagcctccggacgcaggttgaaggataacaatgaataacaacaccacggcaccaacctatacgctgcgtggcttacagttgattggttggcgtgatatgcagcacgccctcgattatctgtttgctgacgggcagcttaagcagggaacgctggttgccattaatgctgaaaaaatgctgactattgaagataacgccgaggtcagggagttaattaacgctgccgaatttaaatatgcggatggcatcagcgttgtacgtagtgtacgtaaaaagtacccgcaggcgcaggtttcccgcgttgccggtgccgatctctgggaagagctgatggcgcgcgcaggcaaagaagggacgccggtatttcttgtgggcggtaaacctgaagtgctggcgcaaactgaagctaaactgcgcaaccagtggaatgtgaatatcgttggcagtcaggatggttattttaaacccgagcagcgtcaggcgctgtttgaacgcattcatgccagcggtgcgcaaatcgtcaccgttgcgatgggaagcccaaagcaggagatcatcatgcgcgactgccgtctggtacatccagatgcgctgtatatgggcgttggcgggacttacgatgttttcaccggtcacgtaaaacgcgcaccgaaaatctggcaaacgctggggctggagtggctctaccgcctgcttagccagccgagccgcattaagcgtcagcttcgtttgctgcgttatttacgctggcactacaccggcaacctatgattttcctctctttgtaaagcgacggagtggtcactccgtcgcctgtctgcttttttattacacaaagcattcaaatttttaatgctttatttgccatttctcctgaattacgaaaacatttgcaacactcgatgtacccataacgataaccggtaacaccggaaagcatgcaaacacaacacgaggatttatggcagataacaaaccagagctacagcgtgggctggaagctcgacatatcgaactcatcgccctggggggcaccattggcgtcggcctgtttatgggggccgccagtaccctgaaatgggccgggccatccgtattgttggcctatatcatcgccgggctgttcgtctttttcatcatgcgtagtatgggcgaaatgttgttcctcgaaccggttaccggtagcttcgccgtttatgcgcatcgttatatgagcccgttctttggctatctcaccgcctggtcttactggtttatgtggatggcggtggggatctctgaaatcaccgccattggcgtttatgtccagttctggttcccggagatggcgcagtggatacccgcattgatcgcagtggcgctggtggcgttggcgaatctggcggcggtgcggttgtacggcgaaatcgagttctggttcgcgatgatcaaagtcaccacgattatcgtgatgattgtcattggcctgggcgtgattttctttggctttggcaatggcgggcagagcattggttttagcaatctcacagagcatggcggtttctttgcgggtggctggaaagggttcctgaccgctctgtgtattgtggtggcgtcctaccagggcgtggagctgattggcattactgccggtgaagcgaagaatccgcaggtgacgctgcgcagtgccgtaggcaaggtgctgtggcggatcctgattttctacgtaggcgcgattttcgttatcgtcaccatcttcccgtggaatgaaataggcagcaacggcagcccgttcgtactgacttttgccaaaatcggtattaccgcagcggcgggcattatcaactttgtggtgctgacggctgcgctctctggctgtaacagcggcatgtacagttgcggacgtatgctctacgcactggcgaaaaaccgtcagttaccggcggcaatggcgaaagtttcccgtcacggcgtaccggttgcgggtgtggcagtatctattgctattctgctaattggcagttgcctgaactacatcattcccaatccgcagcgtgtgtttgtctacgtctacagtgccagcgtgcttccggggatggtgccatggtttgtgatattgataagccagctgcgttttcggcgtgcacataaagcggcgattgccagccatccgttccgcagtatcctgttcccgtgggccaattacgtaacaatggcattcctgatttgcgttttgatcggcatgtactttaatgaagatacgcgtatgagcctgtttgttggcatcatctttatgctggcggtgacggcgatttataaagtttttggccttaatcgccacgggaaagcgcataaactggaggaataagcagcaaaacgcacaaaccgtaaccaaacgcgcaatttatttaaaaagggactagacagaggggtgggaagtccgtattatccacccccgcaacggcgctaagcgcccgtagctcagctggatagagcgctgccctccggaggcagaggtctcaggttcgaatcctgtcgggcgcgccatttagtcccggcgcttgagctgcggtggtagtaataccgcgtaacaagatttgtagtggtggctatagctcagttggtagagccctggattgtgattccagttgtcgtgggttcgaatcccattagccaccccattattagaagttgtgacaatgcgaaggtggcggaattggtagacgcgctagcttcaggtgttagtgtccttacggacgtgggggttcaagtccccccccccctcgcaccacgactttaaagaattgaactaaaaattcaaaaagcagtatttcggcgagtagcgcagcttggtagcgcaactggtttgggaccagtgggtcggaggttcgaatcctctctcgccgaccaattttgaaccccgcttcggcggggttttttgttttctgtgcatttcgtcaccctcccttcgcaataaacgcccgtaataactcattgccccacggtatgatttcgcccttaacgtattgaaggatgacttcaggcaaggagcgaccatgctgcaacaggttccaacgcgtgcttttcatgtgatggcgaaaccgagcggttccgattgtaatctgaactgtgactactgtttttatctcgaaaaacaatccctttaccgcgaaaagccagtcacgcatatggacgatgacacgctggaagcgtatgtccgtcactatatcgctgccagcgaaccgcaaaacgaagtggcttttacctggcagggcggcgaaccaacgctactcgggctggcgttttaccgccgtgccgtagcgctacaggcgaaatatggtgctggcaggaagataagtaacagcttccagactaacggcgtgctgctggatgacgaatggtgcgcgtttctcgcggagcatcattttcttgttggtttaagcctggatggcccgcctgagatccacaatcaatatcgcgtgactaaaggtggcagacccacgcataagctggtgatgcgtgccctgacgctcctgcaaaaacatcatgtcgactataacgtgctggtctgcgttaatcgcaccagcgcgcagcaaccgttgcaggtatatgattttttgtgcgatgcgggagtcgaattcatccagtttattccggtggtcgagcgcctggctgatgaaacaactgcccgcgatggacttaagttacatgcgcctggtgatattcagggtgagctaacggaatggagcgtgcgccccgaggagttcggtgagtttctggtggcgatattcgaccactggatcaaacgcgacgtcggcaagattttcgtgatgaatatcgaatgggcgtttgccaattttgtcggtgcgccgggtgcggtttgccatcatcagccaacctgtgggcgcagcgtgattgttgagcacaacggcgacgtttacgcctgtgatcactatgtttatccgcaatatcggctggggaatatgcaccagcaaacaattgcagaaatgatcgattccccgcaacagcaggcgtttggtgaagataaatttaagcagttaccggcgcagtgtcgcagttgtaacgtgttaaaagcgtgctggggaggctgcccgaaacaccgcttcatgctcgatgccagcggcaaaccgggactgaattatttgtgtgccgggtatcagcgttatttccgccatctaccgccatatcttaaagcaatggctgatttgctggcgcacggtcgcccggccagcgacattatgcatgcgcatttgctggtggtgagtaagtaaaaatcggcggccgcctgcggttgattgccggatgcggcgtaaacgccttatccggcctacatgatcgtgcaaattcaataaattgcagcgttctgtaggctggataagatgcgtcagcatcgcatccggcaaaggcagatctcagcgatagcgccggcttagtcagatttaatctgcgcgcgtggtggatattttttcaggatctccatatacgcgtgcatttcggtctgtagcggtacacccatcggaatatggcgcacgccgatggagtcgctttcctgcggatcggtgtagaggttaaacacgctgcttcccgccgtttgcattactgtgccggtgaatccaccctgatatccgctctgggtataagcgtaaggttgctgaatcaggacgtgatacttgaactcatccatacgcacagcagcgagtttaccgttgaggaagtagtgctcggccttacggttagactgaccatttgttcccaggaagaaggatgtctggtccacaccatcgataaaggtggttttcggcactaaattcgccactttcgctccaggatgccctgccagatccagcgcggtagggaagagatctgccagatcgacaataccgtcagatttacgcggttggatcatccctttccagtaaacgaaagtcggtacgcgaacgccgccttcccaggtgctacctttcgcaccacggaacggggtgcgtccgtgcggcggtacttcggcttccggtccgttatcggaggtaaagacgatcagcgtgttatcaagctgaccgtttttctccagtgttttatacagattagcgaacacatcgttcatctccaccatgcagtcgccatagctggtgcgtgccggagagctacccgcatatttcgcatttgggtagttatcgaagtggcagccacgagtgccgtagtagaggaagaatggtttatcgctcttcgccatcttgtcgaggaacttaacgccatagtccatccagcgttgatccagatcttccatatatttcggcgtaatgtcggcaatggcctgttgttcgccgccgcgcaccgcatgaacgtcatctttgctgaacggtaattgcttgatgtattcagaacggtccggactcagggccacttccggattgacgtgaacgtcgcgccattcggtgtacatatcagacacgctgttaaagccacggaaatcatcaaagccaacgttctgcggctggctctctttgttttcccccatatgccattttccgatggcctgagtgacgtagccctgatcgtgcagcaactgcggcagcgtggttaacccttgcagcccgcccggttgcccgtacattggcggcatcagaatgccgtggtggatggagtattgtccggtgagaatggtggcgcgggttggggaagagcttggttgagaatacgcgctagttaaaatcagcccctggctggcaacggcgtcgatatctggtgtagggttacccaccgccacgccgccaccgttaaaaccgacgtccatccagcccacatcgtccagcaagaaaacaaccacattcggtttcttaccggtttttttctcaagttctgccagcttctgctgggtttctttatcctgcgccggatgctgcattactggcatcatattgtcggcaatagtggtcgccggtttaaccagatactggtttgggtgatcgtatccggcaaagcctttgcgtgcggtggcagtactcggggtatctgctgcgctggccatgagaggaagagcggcggcgacagcaacaacaagacgtttgggactaaagctaaattccatgcaaaatgctccggtttcatgtcatcaaaatgatgacgtaattaagcattgataattgagatccctctccctgacaggatgattacataaataatagtgacaaaaataaattatttatttatccagaaaatgaattggaaaatcaggagagcgttttcaatcctacctctggcgcagttgatatgtaaggcaggtttattatatcgcgttgattattgatgctgtttttagttttaacggcaattaatatatgtgttattaattgaatgaattttatcattcataataagtatgtgtaggatcaagctcaggttaaatattcactcaggaagttattactcaggaagcaaagaggattacagaattatctcataacaagtgttaagggatgttatttcccgattctctgtggcataataaacgagtagatgctcattccatctcttatgttcgccttagtgcctcataaactccggaatgacgcagagccgtttacggtgcttatcgtccactgacagatgtcgcttatgcctcatcagacaccatggacacaacgttgagtgaagcacccacttgttgtcatacagacctgttttaacgcctgctccgtaataagagcaggcgtttttttatgtatcaggaaggccccggaggtgcttgcctccgggtgagaaggaattactgtggcgggttattctgcaacgttaacatcaaaccgtcgcgacgcatagctgcagcttcttccggcttgtgcagtctgtccagcgcgtcggcaagccatgcgtaatcgtaggcgtccggacgttgtttcagcgctgcgcggaaggcgaggcttgcttcctgccattctccgtgcttcatcagactctggcccagtgtgctccacaacagcgggcgatcgccgacgtttttgatttgctggcgcagcactttttccagctgttccggattgtttgttttcagtcgaggaatcggcagcagtaggcgatcgtcgtactggcgtttcaggccatcgatgataatttgctgggcagtatcatgatcgtcacattcaataagatgttccgccattgccacctgcaacgctacctgatgacgcgttttccggctttggtttttccaccagttacgcaaaccttcgctaccgttatcggcacgcgcctgatccatcaggccaatccatgcctgttgttccagcattgcacgatgttcttcatcaccaacatgggctttcgccatacttgggataatatccagcaggctactccatgcacctgtgcggatatacgcctgttccgccagacgtaatacttccggatggcgtggcgtaacttccagcagcttatccacgccgtggcgtgcagcatggttttcattacgggccagttgcagacgtacgcgggtgatttctaccggaatggtgtcgttgccggccagctccgctgcgcgttccagatgttggttggcgcgtgcttcatcaccacgttgttgcgcggcttcggcagccagtagatagttcaccaccggttgttccgcgtgatcggcatttttcgccatcagcttttcaacttgctgataatcgccttccgccagtttcagcagcgcctgttcggtctgcttacgtgcacggcgacgcttacgtccgacaaaccacccacgggtgtgcgcgccagtgcggaagatccgccgcagtagccactcaatggcaaacagcactaccatcgccagaatcaatatgatcgccaggcccgtgacgctggtttcgatattgtagttgtcggtctggatcagcacataaccctgatggccggcaatcatcgggccaaccacgatccccgcaatcagcaacacaaagagcaataacacttttagcatggttattctccttgcggcgcggctgccggagtatcagcttgcggtgcaggtgcaggtttagcttccgttgtccccgctgccggttgtgccagcaggttacgcacgcgagtctgcatcagtttttccagcatcgcctggctttgcagggtttccggaagatccatgctgatattttgctggcttaactggtccacctcgtcgaggaacgctttggtggtggcatcatcagtatcgtagtaagcacgtacccaggtggagacgttctccagcgcctggcgataagtctcttcctggtgacgcggtacagcttgtgctgcgaccagcaggcgagagcgaatattttcgcgcagatagatatcctgatttggcgctaacagcggtacggcggtgtcatcacgacggcgaatcgtaatgaagttgtccataaagttctgccagcttttttgcagattgatacgccattcgctgatggaactggaaagctcttcaccgtcactatccatcgggctaccatcgctgtcattatcggccagacgcaggttatctacctgattactaagctgattaagcttaaggatgatgccgtcataatccacctggcttactgcagaaaggctggcgatatcatcggtaattgcccgacgaacggtaatcagactcgggtcattcatatccgccaggctggcgtctgcacttttcagcaacgctgcagcggtcgtgacgtcctgatcgctccacagcttccgtccggcgagtttcaccagaaaatcggcctgagccagcagccaggttttagcatcgctgccggaaatggtggcgaccttttgttggacttcatccaactgttttgccagcgtttcttgctgacgattcgcctgcttaagttgtgcagcttgttgcttaataatgccttccagctcggctttttggctctcctgggctttttgcaatgccgtcagttggttagccagggcatcgctggtggcggtctgattgacggcctgttgtttaccccagccatacaaaccgatgcccgccgccagagcaatagcgatagccaccgcgctgagaatcaatgcggtattgttcttactctttttttctgttgcgacaggttgactcgtggtgtccacggcctccctggtctcttcaaccacggcggaggttttttcttgttccgtcattatggcttcctgttatgagagttattgtaatgcccgtaaaagcgcatcgttgtcagcgttatcggcgaccttaatgtcttgccagcccagttcccgggcgagtttcgccaaacgctcactgacgaccaatagtcgacagtgtagtaaccagtgctcacgataccattgtgggatcaggctccagagttgctgcaacatttcaccgctggtaacaacgaccatcgtcacctcgcgggcttgccagcgcatcgcttcttctgcaccatcgtaatggattgcgcatcgttgataacattcacaaaaagtgacctcagcaccgcgcgccgtcagggtatccccaattagctcacgaccaccattgccacgtaatatcagcgcacgtttgcccgcaatattttgtaattcaggtaattgtagcaagacttcgctgatttcccgatcctgcgggtagagaatcttctgtccacttacggtatgtagtgccagtgcggtggtgcgtccaatggcgaaataatcaggtagtcggggccatttacgatcttgctgatgcagctgactttgggcaaaagcaaccgcgtgttggctgagggcaaacaacagatcgctctcccccagcgctgccagttgatcagcaagttgcggtaattgttgacccggagaaaactcaatcagcggaaaatgccaggccacctgccccagtgtgcgcagacggctcactaactcttctccagcgggagacgggcgggtgacaaggatactcatgccggggcgtctccgttatagacttcagcgaggatctcgcgcgcgccgttattcagtagctcttctgccaggctaatccccatttgttcggcatcttgcggcgcaccgcggcgttcaccgcgaataatctggctaccgtccggcgcgccgaccagcgcacgcagccagatttcgccatcaataagctcggcgtagctaccaattggcacctgacatccgccttcgagacgggtattcatggcgcgttctgcggtaacgcgcagtgcagtttcgtggtgattcagcgcggcaagcagctcgcgagtgcgactatcatcaaggcggcattcaatacccaccgcaccttgtcctaccgccggaagagaaatctcgggtggcaacgcggcgcgaatacgactctccagacctaaacgttttagtccggctacggcaagaatgatggcatcgtattcgccgttatccagtttgctcaggcgagtgccgacgttgccgcgcagggagcggataatcagatccggacggcgttcagccagttggcactggcgacgtaaactggacgtcccgacgatactgcctgccggtaacgcatccagactgtcatagttattggacacaaaggcatcgcgaggatcttcacgctcacaaatagtgaccagtcccagaccttgcgggaattcaaccggcacatctttcatactgtgtacggcgatatcggcgcgattttcgaggagcgcgacttccagctcttttacaaataagccttttccgcctactttcgccagcggcgtatcaagaatcacatcgccgcgcgtcaccatcggtaccagttcaacgaccaggcccggatggctcgccatcaacttgtctttgacatagtgtgcctgccagagtgcaagtgggctttggcgtgtggcaattcttaaaacattgtctaacatgcttgttaccgtcattatcatccgtggtccatcctaacatccttgccagagtgatgtcagtgttgtggtgaaacgtagacgcctgcgcaaaccgtaaaatgaggtctggcagtggatcctgacaggcgtttcacgccgttgtaataaggaatttacagagaataaacggtgctacacttgtatgtagcgcatctttctttacggtcaatcagcaaggtgttaaattgatcacgttttagaccattttttcgtcgtgaaactaaaaaaaccaggcgcgaaaagtggtaacggttacctttgacatacgaaatatcccgaatgccgcgtgttaccgttgatgttggcggaatcacagtcatgacgggtagcaaatcaggcgatacgtcttgtacctctatattgagactctgaaacagagactggatgccataaatcaattgcgtgtggatcgcgcgcttgctgctatggggcctgcattccaacaggtctacagtctactgccgacattgttgcactatcaccatccgctaatgccgggttaccttgatggtaacgttcccaaaggcatttgcctttacacgcctgatgaaactcaacgccactacctgaacgagcttgaactgtatcgtggaatgagtgtacaggatccgccgaaaggtgagcttccaattactggtgtatacaccatgggcagcaccagctccgtagggcaaagttgttcctctgacctggatatctgggtctgtcatcaatcctggctcgatagcgaagagcgccaattgctacaacgtaaatgtagcctgctggaaaactgggccgccagcctgggtgtggaagtcagcttcttcctgattgatgaaaaccgcttccgtcataatgaaagcggcagcctggggggcgaagattgtggctccacccagcatatactgctgcttgacgaattttatcgtaccgccgtgcgtctcgccggtaagcgtattctgtggaatatggtgccgtgcgacgaagaagagcattacgacgactatgtgatgacgctttacgcgcagggcgtgctgacgccaaatgaatggctggatctcggtggcttaagcagcctttctgctgaagagtactttggtgccagcctttggcagctctacaagagtatcgattccccatacaaagcggtactgaaaacactgctgctggaagcctattcctgggaatacccgaacccacgtctgctggcgaaagatatcaaacagcgtttgcacgacggcgagattgtaagctttggtctcgatccatactgcatgatgctggagcgtgttactgaatacctgacggcgattgaagattttacccgtctggatttagtacgtcgctgcttctatttaaaagtgtgcgaaaagctcagccgtgaacgcgcctgcgtaggctggcgtcgcgcagtgttgagccagttagtgagcgagtggggttgggacgaagctcgtctggcaatgctcgataaccgcgctaactggaagattgatcaggtgcgtgaggcgcacaacgagttgctcgacgcgatgatgcagagctaccgtaatctgatccgctttgcgcgtcgcaataaccttagcgtctccgccagtccgcaggatatcggcgtgctgacgcgtaagctgtatgccgcgtttgaagcattaccaggtaaagtgacgctggtaaacccgcagattagtcccgatctcagcgaaccgaatctgacctttatttatgtgccgccgggccgggctaaccgtagtggttggtatctgtataaccgcgcgccaaatattgagagcatcatcagccatcagccgctggaatataaccgttacctgaataaactggtggcgtgggcatggtttaacggcctgctgaccagccgcacccgtttgtatattaaaggtaacggcattgtcgatttgcctaagttgcaggagatggtcgccgacgtgagccaccatttcccgctgcgcttacctgcaccgacaccgaaggcgctctacagcccgtgtgagatccgccatctggcgattatcgttaacctggaatatgacccgacagcggcgttccgcaatcaggtggtgcatttcgatttccgtaagctggatgtcttcagctttggcgagaatcaaaattgcctggtaggtagcgttgacctgctgtaccgcaacagctggaacgaagtgcgtacgctgcacttcaacggcgagcaaagcatgatcgaagccctgaaaactattctcggcaaaatgcatcaggacgccgcaccgccagatagcgtggaagtcttctgttatagccagcatctgcgcggcttaattcgtactcgcgtgcagcaactggtttctgagtgtattgaattgcgtctttccagcacccgccaggaaaccgggcgtttcaaggcgctgcgcgtttctggtcaaacctgggggttgttcttcgaacgcctgaatgtaagcgtacagaaactggaaaacgccatcgagttttatggcgcgattagccataacaaactgcacggcctgagtgtgcaggttgaaaccaatcacgtcaaattaccggcggtggtggacggctttgccagcgaagggatcatccagttctttttcgaagaaacgcaagacgagaatggctttaatatctacattctcgacgaaagcaaccgggttgaggtatatcaccactgcgaaggcagcaaagaggagctggtacgtgacgtcagtcgcttctacagcagtagccatgaccgttttacctacggcagtagcttcatcaacttcaacctgccgcagttctatcagattgtgaaggttgatggtcgtgaacaggtgattccgttccgcacaaaatctatcggtaacatgccgcctgccaatcaggatcacgatacgccgctattacagcaatattttagctgatgaacgtgccggaaagcgaggcttatccggcatgcaatcttagcggaaactgactgtttcacccgcctgctgcgtcgccgcctgttccagcaaatcccagaaggtttcgccgctgcgatcacaaatccactcatcgcctttcaggtcaaaatggtagccgccctgtttggttgccagccatacctggtgcagcggctcctggcggttgataatgattttgctgccattctcaaaggtaatggtcagtacgccgccgttgatttcgcagtcgatatcgctgtcgccatcccagtcgtccaggcgttcttcaatggtcagccagagttgatcagccaggcgatgaaattcactgtcgttcattgttgtatcctgtttttaagtgatggcggcagtatagcggcatggggtcagggcttcaaagtttgcacctctgcggctgcgttccggcacgatagttccgtcaccggaataatgatgtctctgtgtagcgaaagatttgtctctagtttagggcgcagttacaccacgtctttccctgtttctggtaaacattatgatcaggtttaccgagcgagcatcctcacgctgacggaactaaaaaagacaacaaacaaaccacattgcgatagtgcataaagccatcctggcgcgaggtgccgatcacgaaactaccagcaaaacataaatccccacgagtaagcgttatactcgcagcatttcctcacttttcagacttcataaagagtcgctaaacgcttgcttttacgtcttctcctgcgatgatagaaagcagaaagcgatgaactttacaggcaatccataatgaaaaacgtgtttaaggcactcactgtattacttactctcttcagcctgacgggctgcggtctgaaaggtccgctctatttcccgcctgcagataaaaacgcaccgccgccgaccaaaccggtagagacgcaaacgcaatccacggtgccggataaaaacgatcgcgccactggcgatggtccatcccaggtgaattactaaaagtcagtttctgtacccgcgtgattggagtaaatgatgcagttcagcaaaatgcatggccttggcaacgattttatggtcgtcgacgcggtaacgcagaatgtcttttttagtccggagctgattcgtcgcctggctgatcggcacctgggggtagggtttgaccaactgctggtggttgagccgccgtatgatcctgaactggattttcactatcgcattttcaatgctgatggcagtgaagtggcgcagtgcggcaacggtgcgcgctgctttgcccgttttgtgcgtctgaaaggactgaccaataagcgtgatatccgcgtcagcaccgccaacgggcggatggttctgaccgtcaccgatgatgatctggtccgcgtaaatatgggcgaacccaacttcgaaccttccgccgtgccgtttcgcgctaacaaagcggaaaagacctatattatgcgcgccgccgagcagacaatcttatgcggcgtggtgagcatgggaaatccgcattgcgtgattcaggtcgatgatgtcgataccgcggcggtagaaacgcttggtcctgttctggaaagccacgagcgttttccggagcgcgccaatatcggttttatgcaagtggttaagcgcgagcatattcgtttacgcgtttatgagcgtggggcaggagaaacccaggcctgcggcagcggcgcgtgtgcggcggttgcagtagggattcagcaaggtttgctggccgaagaagtacgcgtggaactccccggcggtcgtcttgatatcgcctggaaaggtccgggtcacccgttatatatgactggcccggcggtacatgtctacgacggatttattcatctatgaagcaaccaggggaagaactgcaggaaacactcacggagcttgatgaccgggcggttgtcgattatctgattaaaaatcctgagttttttatccgtaatgcgcgcgcagtagaagcgatacgtgtgccgcatccggtacgcggcaccgttagcttggtcgagtggcacatggcccgcgcacgtaatcatattcatgttctggaagagaacatggcgctgttgatggaacaggctatcgccaacgaaggcctgttttatcgcctactctacctgcagcgcagtctcaccgccgccagcagtctcgacgatatgctgatgcgctttcaccgctgggcgcgcgatctcggcctggcaggtgcgagtctgcgcctgtttccggatcgctggcgcttaggtgcgccgagcaaccacactcatctggcattaagccgtcagtctttcgaaccgctgcgtattcagcgtttggggcaggaacagcactatcttgggccgcttaacggaccagagctgctggtggtgctaccggaagcgaaagcggtgggaagcgtggcgatgagcatgctgggaagcgatgctgatttgggtgtcgtgctgtttaccagtcgcgatgccagtcactatcaacaagggcaaggaacgcagttacttcatgaaattgcgctgatgttgccggagcttctggagcgttggattgaacgcgtatgaccgatttacacaccgatgtagaacgctacctacgttatctgagcgtggagcgccagcttagcccgataaccctgcttaactaccagcgtcagcttgaggcgatcatcaattttgccagcgaaaacggcctgcaaagctggcagcaatgtgatgtgacgatggtgcgcaattttgctgtacgcagtcgccgtaaagggctgggagcagcaagtctggcgttacggctttctgcgctacgtagcttttttgactggctggtcagccagaacgaactcaaagctaacccggcgaaaggtgttagcgcaccgaaagcgccgcgtcatctgccgaaaaacatcgacgtcgacgatatgaatcggctgctggatattgatatcaatgatcccctcgctgtacgcgaccgtgcaatgctggaagtgatgtacggcgcgggtctgcgtctttctgagctggtggggctggatattaaacacctcgacctggagtctggtgaagtgtgggttatggggaaaggcagcaaagagcgccgcctgccgattggtcgcaacgctgtggcgtggattgagcactggcttgatttgcgcgacctgtttggtagcgaagacgacgcgctttttctgagcaaactgggcaagcgtatctccgcgcgtaatgtgcagaaacgctttgccgaatggggcataaaacaagggctgaataatcacgttcatccgcataaattacgtcacagcttcgccacgcatatgctggagagcagcggcgatcttcgtggtgtgcaggagctgctgggtcatgccaacctctccaccacgcaaatctatactcatcttgattttcaacaccttgccagcgtgtacgatgcggcgcatccacgcgccaaacgggggaaataatgcgtttttaccggcctttggggcgcatcagcgcgctcacctttgacctggatgataccctttacgataaccgtccggtgattttgcgcaccgagcgagaggcgcttacctttgtgcaaaattatcatccggcgctgcgcagcttccagaatgaagatctgcaacgcctgcgccaggcggtacgggaagcggaacccgagatttatcacgacgtgacgcgctggcgttttcgtagcattgaacaagcgatgctcgacgccgggctgagtgccgaagaagccagtgcaggcgcacacgcagcaatgatcaactttgccaaatggcgcagccgaatcgacgtcccgcagcaaactcacgacaccttaaaacagctggcgaagaaatggccgctggtggcgatcaccaacggtaacgcccagccggagctgtttggtttgggggattattttgagtttgtgctgcgcgctggcccgcacgggcgcagtaaaccgttcagcgatatgtactttttggctgcggaaaaactcaacgtgccgatcggcgagatcttacatgttggggacgatctcaccactgacgtgggtggggcaattcgcagcggaatgcaggcttgttggatcagaccggaaaatggcgatctgatgcaaacctgggacagccgtttactgccgcatctggaaatttcccggttggcatctctgaccagcctgatataatcagcaaatctgtatatatacccagctttttggcggagggcgttgcgcttctccgcccaacctatttttacgcggcggtgccaatggacgtttcttacctgctcgacagccttaatgacaaacagcgcgaagcggtggccgcgccacgcagcaaccttctggtgctggcgggcgcgggcagtggtaagacgcgcgtactggtgcatcgtatcgcctggttgatgagcgtggaaaactgcagcccatacagcattatggcggtgacgtttaccaacaaagcggcggcggagatgcgtcatcgtatcgggcaactgatgggcacgagccagggcggtatgtgggtcggcaccttccacgggctggcgcaccgtttgctgcgtgcgcaccatatggacgccaatctgccgcaggatttccagatcctcgacagtgaagaccagctacgcctgcttaagcgtctgatcaaagccatgaacctcgacgagaagcagtggccgccgcggcaggcaatgtggtacatcaacagccagaaagatgaaggcctgcgtccgcatcatattcaaagctacggtaatccggtggagcagacctggcagaaggtgtatcaggcgtatcaggaagcgtgtgaccgcgcgggcctggtggacttcgccgagctgctgctgcgcgctcacgagttgtggcttaacaagccgcatatcctgcaacactaccgcgaacgttttaccaatatcctggtggacgaattccaggataccaacaacattcagtacgcgtggatccgcctgctggcgggcgacaccggcaaagtgatgatcgtcggtgatgacgaccagagtatctacggctggcgcggggcgcaggtggagaatattcagcgtttccttaatgatttccccggtgccgaaactattcgtctggagcaaaactaccgctctaccagcaatattctgagcgccgctaacgccctgattgaaaacaataacgggcgtctgggtaaaaaactgtggaccgatggcgcggacggtgagcctatttccctctattgcgcttttaacgaactcgatgaagcgcgttttgtggttaaccgcatcaaaacctggcaggacaacggcggagcgcttgccgagtgcgccattctctaccgcagcaacgcccagagccgggtgctcgaagaggcgttattgcaggccagtatgccgtaccgtatttacggcgggatgcgcttcttcgaacgccaggaaatcaaagatgcgctcagctatctgcgcctgattgccaaccgcaacgacgacgcggcctttgagcgtgtggtgaatacgccaacgcggggtattggtgaccggacgctggacgtggtacgtcagacaagccgcgatcgccagttaacactctggcaggcatgtcgtgagctgttgcaggaaaaagccctcgccgggcgagctgccagcgccttgcagcgatttatggaattaatcgacgccttagcgcaggaaactgccgatatgccgctgcatgtacagactgaccgggtaattaaagactccggcctgcgtaccatgtatgagcaggagaagggcgaaaaaggtcagacgcgtatcgaaaacttagaggaactggtgacggcaacgcgccagttcagctacaacgaagaagacgaagatttaatgccgctgcaggcgttcctctcccatgcggcactggaagcaggtgaagggcaggcggatacctggcaggatgcggtgcagttgatgacgctacacagcgcgaaaggcctggagttcccgcaggtgtttatcgttggtatggaagagggcatgttcccaagccagatgagcctggatgaaggcgggcgtctggaagaagaacgccgtctggcctacgttggcgtaacccgcgcgatgcagaaactgacgctgacctacgcggaaacccgccgtctgtatggtaaagaggtttaccatcgcccgagccgctttatcggcgagctgccggaagagtgtgtggaagaggtgcgcctgcgcgccacggtaagccgcccggtcagccatcagcggatgggtacgccgatggtcgagaacgacagcggctacaagctcggccagcgcgtacgccacgctaagtttggtgaaggcaccattgtcaatatggaaggcagcggtgagcatagccgtttgcaggtggcatttcagggccagggtattaaatggctggtggcggcatacgcccggctggagagcgtgtaacgttgccggatgcggtgctgcgcaccttatttggcctaaaaaatcattcagattcaataaattgcaacgtcatgtaggccggatagggcgtttacgccgcatccggcatctgcgccatcttcagtatctgacacaaaactatcgttttaacctttccgctcgacggaaatcatggtgacaaaaggatagcgttgccacgggattgccccgcctttcatatacatatgactaatcgtgccatcaagataaagcagctgctcaacgttcagtttcgctttggcataacaggcaaaatcataaaaatttgttgcctgctggctcaacaaaaacacggcgttcccatgtttattaatcccaacaccgttacgaattttgctactggcgacgttgggatgaatacgcggattaattacaccgttttccatcaacattggcccactctgcaccgcaaactgaatctctttactggttttgaaggcatccagacgaacgatgccgactttatctcccgcgacataaaacacgccgccaggacggataaagaaattcccttcaccactagcgagatttaacgccaccttctgctgaccgttttcgatgtacaaaccgagcggcgcatagctttcatcatagatgccgccgttcatcgccatctgcacctgaccctgactattaatatccgccagcagagcatgtaacgttccccacgcttcgccattggctttttgccagtacattttcacccgctctgtttgaggattaacggtatacgcctgtacggtcagcgtcggatcactgagtgcgcaatcatcagcggcaacagcaaacaagggaagtaaggtgagggcgagaaaaatccgtttgagattcaaggtgatcattcctttaccaatgagtagctgatgcgccattataggtcctggatgtgggatttttttatcctgttagcgaccttgacgagtaccaaaaagcgcgaagttcaactattgttctgtggtgttctgttgcgtgttgacggcaaaattttgctggcgtaacatgcgcgcacgatcactctaagaggacattcgccttggacacacccagtagatactggctcactatcctgtcatccaggatcaactcctaaggctatccctttttgctgatagccttagcggttgtcagcgacctcaatttttcccgtcgcgctgagtcaggctgtttaatggtctgaaacccaatttgtttctgtgtgcccaccgaactgtccgatattttaagcattgggagtcccggtcatgctgagcgcatttcaactggaaaataaccgactgacccggctggaagtcgaagagagtcaaccccttgtaaatgcagtatggattgatcttgtcgaaccggacgacgacgagcgactgcgcgtacaatctgaacttggccagagcctggcaacccgcccggaactggaagacatcgaagcaagcgcacgtttctttgaagacgacgacggcctgcatattcactccttcttcttctttgaagatgcggaagatcacgccggtaactccactgtggcatttaccatccgtgatggtcgtctgtttactctgcgtgagcgtgaactgcccgcttttcgtctgtatcgtatgcgtgcccgtagccagagcatggtagacggtaacgcctacgagttgctgctggatctgttcgaaaccaaaatcgaacagttggcagatgaaattgaaaatatctatagcgacctggagcagttgagccgggtgattatggaagggcatcagggcgatgagtacgacgaggcgctctccactctggcggaactggaagatatcggctggaaagttcgcctgtgtctgatggatacccagcgcgcgctcaacttcctggtgcgtaaagcgcgtttaccgggtgggcaactggagcaggcgcgtgaaatcctgcgagatatcgaatccctgctgccgcataacgaatccctgttccagaaggtgaacttcctgatgcaggcggcaatgggttttatcaacatcgagcagaaccgcatcatcaaaatcttcagcgtggtatccgtggtattcctgccgccgacgctcgttgcttccagctatggcatgaactttgagtttatgccagaactgaagtggagcttcggctaccctggcgcgattatctttatgatcctcgcgggcctggcaccgtatctgtactttaagcggaagaactggttgtaaaaaacgagagcggtggcttagtctggctaagccacctgttattcaaaggctccaggtatttaacccttttacctctttctcatagaaccatttgttcgtgttaacagcaacataggctgctacggcaattcccagaatgttaacgccaattagtgcaccaacaaatagagatagaataccaagtaatagaactataattgcttttttccataaccccaggacaaataaatatatccaggaacagaagaaagcaatgaaattcatttgaatagttaagcgttgtcttacttttaatgctttaaatgctgctttatattctggtgttgccccccagaatccaggaaaaccatgttgatcataaaaattaaatcggtatttccatttttcacttaaactaccatcgttcatatattccttactcataaatactccataattattgtttactactatcagtaggtgcaagcattagcatactgaaagtggaaaaataacaaatcaaaaaaatcatgctaccattgccactacaggcaaaatcttcggctatcattgtgatgatagagatgatatatactgctaatgtaccaaaaacataagtttttatatagatgaaaccactatcacggagtcgctggcaattcatgttgatgacgagataatggagtacgatggtagagactataacaagaaagcctgcttctccatcgttaaaaaagataataagaaaggcaaaaatgaaatttattaaaataaaactaaatatataacgacgtctggaaatcttaccgttagatgttgggataaatatacgtaacataaattttacatccttgtatgagtctccggtcagcatggcaatatgcccactctcatgcaagagtcggcatattttttcagaatatatttattttttatttggacgttctacgctgcgtataaatcgcatccatcacaaaaattgccagcgccacccaaataaaggcgaaagtcaccatcttatcggcacccggtttttcaccataaaacgtcacagccagcaggaacatcagcgtcgggccaatgtactggaaaaagcctaacgtactgagacgcaagcgcgtggcagcggcggtaaaacacaacagcggtacggtagtgacaataccggcggcgatcagcagtaaattcaggctcatcgggttttgccccatatggctggtactgctgtcggcaatagcaaacaggtaaattgccgccacgggcagcagccacatggtttcgattaacatgccggtttgcgcttcaacggcaatcttcttgcgtaccagaccgtagaaggcaaaactaaatgccagtcccagcgcgataataggtaggctaccaaaagtccacagctggactaacacgccacatatcgccagaatcaccgccagccattgcatccggcggaatcgctcgccgaggaaaatcatccccagcacaatgttcaccagcgggttaataaagtaaccaaggctcgcttccagcatatggtgattgttcaccgcccagataaacagtagccagttgccaccaatcagcacggcagagactgccagcataaaaattttctgtggcgtctgaatcagcgtttttaaataggaccactggcggcaaatgctcatcagcaccaccataaagaaaaagctccagatcacgcgatgcgtcaggatttcatcggcgggcacgtagtaaatcaacttgaagtacgctggcgctataccccaaataaaataagcggcaagagcgagtaatacgccctgccgcgtttgttttgcatccatcgggaatactcatttttaattggtaacagcagtttacctgcttttatgtcttcaacctaccatataggtggcggtggcactggcaatataaagctgttcttcattgtgtaattcaacgcgggcgacggcgactttattgcctgcacgcaacaggctactagtagcagtaaaacgctcgcccctgcctgggcgcagataatcaacgcgaagatcaatggtccccatccggcttagccgctggcgtagttcatcttcactgatggtttcgtggcgggttaaggtacttcccacgcacaccagaccggcggcgacatccagcgcgctcgcaatgaccccgccgtgcaaaatgctttgcgcccagttgcccaccatcattggctgatttttaaaggccagctgtgcgaactctttttcgtaacgctccagttccatccccaatgcgcggttaaatggcatgtgataaacaaacatctcacccactaatttcagggcttgttcagcggtcagtacggcagacatatcatccttacacttcattggttaatgaaatgttgattttatgcttctttgttgttggtttctactttaggaagggataactaacggctatggagttaagtatgtaaaatagcccgcagaaaaatattcaccttatcaataattcgttacggagaacacgaccgatgcggactctgcagggctggttgttgccggtgtttatgttgcctatggcagtatatgcacaagaggcaacggtgaaagaggtgcatgacgcgccagcggtgcgtggcagtattatcgccaatatgctgcaggagcatgacaatccgttcacgctctatccttatgacaccaactacctcatttacacccaaaccagcgatctgaataaagaagcgattgccagttacgactgggcggaaaatgcgcgtaaggatgaagtaaagtttcagttgagcctggcatttccgctgtggcgtgggattttaggcccgaacagcgtgttgggtgcgtcttatacgcaaaaatcctggtggcaactgtccaatagcgaagagtctagtccgtttcgtgaaaccaactacgaaccgcaattgttcctcggttttgccaccgattaccgttttgcaggttggacgctgcgcgatgtggagatggggtataaccacgactctaacgggcgttccgacccgacctcccgcagctggaaccgcctttatactcgcctgatggcagaaaacggtaactggctggtagaagtgaagccgtggtatgtggtgggtaatactgacgataacccggatatcaccaaatatatgggttactaccagcttaaaatcggctatcacctcggtgatgcggtgctcagtgcgaaaggacagtacaactggaacaccggctacggcggcgcggagttaggcttaagttacccgatcaccaaacatgtgcgcctttatactcaggtttacagcggctatggcgaaagcctcatcgactataacttcaaccagacccgtgtcggtgtgggggttatgctaaacgatttgttttgatgaacggttgagtggttggcaaatctggaatccagcatccaggattaccctctcagagactaaaagcattgcagtttctcgcgcaggcgctgaaaatagcgcctgtttttatttcaggcaatcggggtgaatgtggcgcaggcggaagtgttgaatctggagtccggagctaaacaggttttacaagaaacctttggctaccaacagtttcgccccggccaggaagaaattatcgacactgtgctttccggccgcgattgcctcgtcgtcatgcccactggtggcggaaaatccctttgctatcaaatccctgccttattgctaaacggccttaccgtggttgttagtccgctgattagcttgatgaaagatcaggtggatcaactgcaagccaacggcgtggcggcggcgtgccttaacagcacgcaaacccgcgaacagcaacttgaagtgatgacaggctgccgcaccgggcaaattcgtctgctttatatcgccccggaacgcctgatgctggataactttcttgagcatctggcgcactggaatccggtgttattagccgttgatgaagcgcactgtatctcccaatggggccacgatttccgcccggaatatgccgcgctcggtcagttgcgccagcggttcccgacgctgccgtttatggcgctgaccgccacagccgacgacaccacgcgccaggatatcgtgcgcctgctggggctgaacgatccgctgattcaaatcagcagttttgaccgtccgaatattcgctacatgctgatggagaagttcaaaccgctcgatcagttgatgcgctacgtgcaggaacagcgcggtaagagtggcattatctactgcaacagccgcgcgaaagtagaagacaccgctgcgcgcctgcaaagcaagggaattagcgcggcggcctatcatgccgggctggaaaataatgttcgcgccgatgtgcaggaaaaattccagcgcgatgacctgcaaattgtggtggcgacggtggcgttcggcatgggcatcaataaaccaaacgttcgcttcgtggtccactttgatattccgcgcaatatcgaatcctattatcaggaaaccggacgcgccgggcgtgatggcctgcccgcggaagcgatgctgttttacgatccggctgatatggcgtggctgcgccgttgtctggaagagaagccgcaggggcagttgcaggatatcgagcgccacaaactcaatgcgatgggcgcgtttgccgaagcgcaaacttgccgtcgtctggtattgctgaactattttggcgaagggcgtcaggagccgtgcgggaactgcgatatctgcctcgatccgccgaaacagtacgacggtagtaccgatgctcagattgccctttccaccattggtcgtgtgaatcagcggtttgggatgggttatgtggtggaagtgattcgtggtgctaataaccagcgtatccgcgactatggtcatgacaaactgaaagtctatggcatgggccgtgataaaagccatgaacattgggtgagcgtgatccgccagctgattcacctcggcctggtgacgcaaaatattgcccagcattctgccctacaactgacagaggccgcgcgcccggtgctgcgcggcgaatcctctttgcaacttgccgtgccgcgtatcgtggcgctcaaaccgaaagcgatgcagaaaagcttcggcggcaactatgatcgcaaactgttcgccaaattacgcaaactgcgtaaaagcatagccgatgaaagtaatgtcccgccgtacgtggtgtttaacgacgcaaccttgattgagatggctgaacagatgccgatcaccgccagcgaaatgctcagcgttaacggcgttgggatgcgcaagctggaacgctttggcaaaccgtttatggcgctgattcgtgcgcatgttgatggcgatgacgaagagtaatcagcagcataaaaaagtgccagtatgaagactccgtaaacgtttcccccgcgagtcaaatgtatgttgatgttatttctcaccgtcgccatggtgcacattgtggcgcttatgagccccggtcccgatttcttttttgtctctcagaccgctgtcagtcgttcccgtaaagaagcgatgatgggcgtgctgggcattacctgcggcgtaatggtttgggctgggattgcgctgcttggcctgcatttgattatcgaaaaaatggcctggctgcatacgctgattatggtgggcggtggcctgtatctctgctggatgggttaccagatgctacgtggtgcactgaaaaaagaggcggtttctgcacctgcgccacaggtcgagctggcgaaaagtgggcgcagtttcctgaaaggtttactgaccaatctcgctaatccgaaagcgattatctactttggcagcgtgttcagtttgtttgtcggtgataacgttggcactaccgcgcgctggggcatttttgcgctgatcattgtcgaaacgctggcgtggtttaccgtcgttgccagcctgtttgccctgccgcaaatgcgccgtggttatcaacgtctggcgaagtggattgatggttttgccggggcgttatttgccggatttggcattcatttgattattagccggtgatgccagacgcgtcttcagagtaagtcggataaggcgtttacgccgcatccgacattatttttcacgcatgcctcgcgcttgctaacagcgctcccaccagcataaacaagctgccgaaaatcttattcagcgccttcatctgctttggtcctttaatccatagagcaatccgttgagcaagggtggcgtaaccgatcatcacaataatatcgaccacaatagtggtgacgccgagcacgatatactgcatcagttgcggctgttgcggcatgatgaattgcggaaatagcgccgccagaaacacaatacttttgggattggtgagattcacaaaaactgcgcgctggaacaaatgtcgacggctttgagtagaggccaggcttttaaggtcaattgcaccagcggcgcgccactgctggattcccagccaaatcaagtaagccgcgcctgcccacttcaacacttcaaacgcaatcacactgcgggaaaatagcgtccccaaccccacgccaaccagcacaatatgaatcgccagtccggtctgaagcccagcaatagacgccaccgcgccgcgataaccgtggttgaggctggtggtcatagtgttgattgcaccagagcctgggctcaggcttaaaatgatgcttgtcagcaggtaggcaaaccaccattctaaggtcatgatgaactcccggtgtgtctatttttgtgccacaatacgctactgtcgcagcgttgtgtcaggcacgctaaaaaaaacgattttacgtggtttaagaggcagattacccgatgtttcagcagcaaaaagactgggaaacaagagaaaacgcgtttgctgcttttaccatgggaccgctgactgatttctggcgtcagcgtgatgaagcagagtttactggtgtggatgacattccggtgcgctttgtccgttttcgcgcacagcaccatgaccgggtggtagtcatctgcccggggcgtattgagagctacgtaaaatatgcggaactggcctatgacctgttccatttggggtttgatgtcttaatcatcgaccatcgcgggcagggacgttccggtcgcctgttagccgatccgcatctcgggcatgttaatcgctttaatgattatgttgatgatctggcggcattctggcagcaggaggttcagcccggtccgtggcgtaaacgctatatactggcacatagcatgggcggtgcgatctccacattatttctgcaacgccatccaggtgtatgtgacgccattgcgctaactgcgccaatgtttgggatcgtgattcgtatgccgagttttatggcacggcagatcctcaactgggccgaagcgcatccacgtttccgtgatggctatgcaataggcaccgggcgctggcgcgcgttgccgtttgctatcaacgtactgacccacagcagacagcgatatcgacgtaacttacgcttctatgctgatgacccaacgattcgcgtcggtgggccgacctaccattgggtacgcgaaagtattctggctggcgaacaggtgttagccggtgcgggtgatgacgccacgccaacgcttctcttgcaggctgaagaggaacgcgtggtggataaccgcatgcatgaccgtttttgtgaactccgcaccgccgcgggccatcctgtcgaaggaggacggccgttggtaattaaaggtgcttaccatgagatcctttttgaaaaggacgcaatgcgcagtgtcgcgctccacgccatcgttgattttttcaacaggcataacagtcccagcggaaaccgctctacagaggtttaaatttcttatgtaccaggttgttgcgtctgatttagatggcacgttactttctcccgaccatacgttatccccttacgccaaagaaactctgaagctgctcaccgcgcgcggcatcaactttgtgtttgcgaccggtcgtcaccacgttgatgtggggcaaattcgcgataatctggagattaagtcttacatgattacctccaatggtgcgcgcgttcacgatctggatggtaatctgatttttgctcataacctggatcgcgacattgccagcgatctgtttggcgtagtcaacgacaatccggacatcattactaacgtttatcgcgacgacgaatggtttatgaatcgccatcgcccggaagagatgcgcttttttaaagaagcggtgttccaatatgcgctgtatgagcctggattactggagccggaaggcgtcagcaaagtgttcttcacctgcgattcccatgaacaactgctgccgctggagcaggcgattaacgctcgttggggcgatcgcgtcaacgtcagtttctctaccttaacctgtctggaagtgatggcgggcggcgttagtaaaggccatgcgctggaagcggtggcgaagaaactgggctacagcctgaaggattgtattgcgtttggtgacgggatgaacgacgccgaaatgctgagcatggcggggaaaggctgcattatgggcagtgcgcaccagcgtctgaaagaccttcatcccgagctggaagtgattggtactaatgccgacgacgcggtgccgcattatctgcgtaaactctatttaagctaatcgttctttatttggtcagttgtcaacctgatacttcgctacaatggatacccgttaatcaaagagttttccattgtggcgctacttatcatcaccacgattctgtgggccttctcctttagcttttatggcgagtaccttgcggggcacgtcgatagctattttgcggtgctggtgcgcgttggcctggcggcactcgtttttctgccgtttctgcgtacccgtggcaatagcctgaaaacggtcggcctgtatatgctggtgggcgcgatgcagcttggcgtgatgtatatgctgagtttccgcgcttatctctacctgacggtttccgagctgctgctgttcaccgtgctgacgccgctctacatcacgctgatttatgacatcatgagtaagcgccgtctgcgctggggctatgcctttagcgccttgctggcggtgattggtgccgggattattcgctatgatcaggtcaccgaccatttctggactggcttgctgctggtgcaactctccaatatcacttttgccattggcatggtgggttacaaacgcctgatggaaactcgcccgatgccacagcataacgcctttgcgtggttctatcttggcgcgtttctggtggcagtgattgcatggttcttgctgggaaatgcgcagaaaatgccgcaaaccacgctgcaatggggcattctggtgtttcttggcgtggtggcttccgggattggctactttatgtggaactacggcgcgacgcaggtggacgccggaacgctgggcattatgaataatatgcacgttccggcagggctgctggtaaacctggctatctggcaccaacagccgcactggccaacgtttattacaggcgcgctggtgatcctggccagtctgtgggtgcatcgtaagtgggtcgctccgcgctctagtcaaacggcagatgatcgcaggcgtgattgcgcgctgagcgaataattacaggcgcgctggacttcctggcctcactgtgggtgcatcgtaagtgggtcgctccgcgctcttcacaaacggcagatgatcgcaggcgtgattgcgcgcactgcgaataaacgcttccgtaactggctgacgctgctcgccatcgcgcacggcggcgtacagtcggctccacaagccttcgcccagggttttggtcaccaccagaccctggcgctcaaaactctctactacccaatgcggtagcgcggcaatacccatccgcgcggcaaccatctgaatcaacaataaggtgttatcgacgcttttcagactcgggctgacgcctgccggctgaagaaaatgccgccagacatccagtcgactacgctgcaccggataaattaatagcgtctcgctggcgagatcttccggtgtaattcgcgttttcgccgccagtggatggtcaggtgctaacaccagacgcacttcatagtcgaacatcgggctataatgcaggccactgcgcggcagaatatcggacgtcattaccagatccagctctccctgttgcaaggcgggctgcgggtcaaatgtcacgccgcttttaaaatccatctctacctgcggccagttcttatggaaattttctaacgcgggtgtcagccactgaatacagctatggcactcaatggcaatgcgcagacgcgtctgctgcggttcattgcaggcttgcagggcctggctaatttgcggcagtacctggtttgccagttgcaacaggatttctccctgcggtgtaaagcgtagcggctggctcttacgcacaaatagccggaagccaaggcgttgttccagatcgctaaactggtgagacagggcggattgcgtctgatgcaacgtcgccgcagcggctgcgaggctgccgcagttccgcaacgcttgtagcgttttcaggtgttttacttcgatcatgaaagtccttcacttcggcatgaataatttgcgcttgaggaatatacagtaaccgccaattatggatgtgtaaacatctggacggctaaaatccttcgtcttttaaatttatggtgcgttggctgcgtttctccaccccggtcacttacttcagtaagctcccggggatgaataaacttgccgccttccctaaattcaaaatccataggatttacatataattagaggaagaaaaaatgacaatattgaatcacaccctcggtttccctcgcgttggcctgcgtcgcgagctgaaaaaagcgcaagaaagttattgggcggggaactccacgcgtgaagaactgctggcggtagggcgtgaattgcgtgctcgtcactgggatcaacaaaagcaagcgggtatcgacctgctgccggtgggcgattttgcctggtacgatcatgtactgaccaccagtctgctgctgggtaacgttccggcgcgtcatcagaacaaagatggtagcgtagatatcgacaccctgttccgtattggtcgtggacgtgcgccgactggcgaacctgcggcggcagcggaaatgaccaaatggtttaacaccaactatcactacatggtgccggagttcgttaaaggccaacagttcaaactgacctggacgcagctgctggacgaagtggacgaggcgctggcgctgggccacaaggtgaaacctgtgctgctggggccggttacctggctgtggctggggaaagtgaaaggtgaacaatttgaccgcctgagcctgctgaacgacattctgccggtttatcagcaagtgctggcagaactggcgaaacgcggcatcgagtgggtacagattgatgaacccgcgctggtactggaactaccacaggcgtggctggacgcatacaaacccgcttacgacgcgctccagggacaggtgaaactgctgctgaccacctattttgaaggcgtaacgccaaatctcgacacgattactgcgctgcctgttcagggtctgcatgttgacctcgtacatggtaaagatgacgttgctgaactgcacaagcgcctgccttctgactggttgctgtctgcgggtctgatcaatggtcgtaacgtctggcgcgccgatcttaccgagaaatatgcgcaaattaaggacattgtcggcaaacgtgatttgtgggtggcatcttcctgcagcttgctgcacagccccatcgacctgagcgtggaaacgcgtcttgatgcagaagtgaaaagctggtttgccttcgccctacaaaaatgccatgaactggcactgctgcgcgatgcgctgaacagtggtgacacggcagctctggcagagtggagcgccccgattcaggcacgtcgtcactctacccgcgtacataatccggcggtagaaaagcgtctggcggcgatcaccgcccaggacagccagcgtgcgaatgtctatgaagtgcgtgctgaagcccagcgtgcgcgttttaaactgccagcgtggccgaccaccacgattggttccttcccgcaaaccacggaaattcgtaccctgcgtctggatttcaaaaagggcaatctcgacgccaacaactaccgcacgggcattgcggaacatatcaagcaggccattgttgagcaggaacgtttgggactggatgtgctggtacatggcgaggccgagcgtaatgacatggtggaatactttggcgagcacctcgacggatttgtctttacgcaaaacggttgggtacagagctacggttcccgctgcgtgaagccaccgattgtcattggtgacattagccgcccggcaccgattaccgtggagtgggcgaagtatgcgcaaagcctgaccgacaaaccggtgaaagggatgctgacggggccggtgaccatactctgctggagcttcccgcgtgaagatgtcagccgtgaaaccatcgccaaacagattgcgctggcgctgcgtgatgaagtggccgatctggaagccgctggaattggcatcatccagattgacgaaccggcgctgcgcgaaggtttaccgctgcgtcgtagcgactgggatgcgtatctccagtggggcgtagaggccttccgtatcaacgccgccgtggcgaaagatgacacacaaatccacactcacatgtgttattgcgagttcaacgacatcatggatagcattgcggcgctggacgcagacgtcatcaccatcgaaaccagccgttccgacatggagttgctggagagctttgaagagtttgattatccaaatgaaatcggtcctggcgtctatgacattcacagcccaaacgtaccgagcgtggaatggattgaagccttgctgaagaaagcggcaaaacgcattccggcagagcgcctgtgggtcaacccggactgtggcctgaaaacgcgcggctggccagaaacccgcgcggcactggcgaacatggtgcaggcggcgcagaacttgcgtcgggggtaaaatccaaaccgggtggtaataccacccggtcttttctcattacaggctcttcttcccaccatactgcttaaaccattccagcatacgctgccagccatcttctgcagatgcggcatgatagctcgggcgataatcagcgttgaatgcatgcccggcgtccgggtacacgataatctctgctttcgcattagcagcccgcagcgcctggcgcatggtttcaacgctctcctgcggaatgctgttatcctgaccaccatataagccgagaatcggcgcgttaagatcggttgcgatatcaacaggttgtttcggactattcaggctcttgtcgcccgtcagtttgccgtaccacgccactgcggcttttagctgtggattatgcgcggcatacagccaggtgatacgtccaccccagcagaatccggtgatcattaaacgatgaacatcgccgccgttgcgggaagcccaactggcgacatgatcgagatcggccagcacctggctgtcaggcacttttgctaccagaccgctaagcaacgtggggatatcggcaaaatcattcggatcgccttcgcggaagtaaagttcaggtgcgatagccagatacccctccagcgccagacggcgacaaatgtcgcggatatgttcatgcacgccaaaaatttcctgcactacaatgaccactggcagtgggccatcgctttgctttggtctggcatggtaagcaggcatgttatccccttgactagggatagaggtgaagcccgccacaatcgcgtcgtccggggtctgaacgatggtgctagcgagagggcttgcagcaggtgcaaatccagattgttgtgttgttgccatggtattctccgtacccttataaaaatgttgcgcaatgttaactatagtcagcatgcaacaaatcacattgcctgaatcggctcatcttttatgcagtcctgcagaatgaagggtgatttatgtgatttgcatcacttttggtgggtaaatttatgcaacgcatttgcgtcatggtgatgagtatcacgaaaaaatgttaaacccttcggtaaagtgtctttttgcttcttctgactaaaccgattcacagaggagttgtatatgtccaagtctgatgtttttcatctcggcctcactaaaaacgatttacaaggggctacgcttgccatcgtccctggcgacccggatcgtgtggaaaagatcgccgcgctgatggataagccggttaagctggcatctcaccgcgaattcactacctggcgtgcagagctggatggtaaacctgttatcgtctgctctaccggtatcggcggcccgtctacctctattgctgttgaagagctggcacagctgggcattcgcaccttcctgcgtatcggtacaacgggcgctattcagccgcatattaatgtgggtgatgtcctggttaccacggcgtctgtccgtctggatggcgcgagcctgcacttcgcaccgctggaattcccggctgtcgctgatttcgaatgtacgactgcgctggttgaagctgcgaaatccattggcgcgacaactcacgttggcgtgacagcttcttctgataccttctacccaggtcaggaacgttacgatacttactctggtcgcgtagttcgtcactttaaaggttctatggaagagtggcaggcgatgggcgtaatgaactatgaaatggaatctgcaaccctgctgaccatgtgtgcaagtcagggcctgcgtgccggtatggtagcgggtgttatcgttaaccgcacccagcaagagatcccgaatgctgagacgatgaaacaaaccgaaagccatgcggtgaaaatcgtggtggaagcggcgcgtcgtctgctgtaattctcttctcctgtctgaaggccgacgcgttcggccttttgtatttttgcgtagcgcctcgcaggaaatgcctttccaactggacgtttgtacagcacaattctattttgtgcgggtaagttgttgcgtcaggaggcgttgtggatttcagtatcatggtttacgcagttattgcgttggtgggtgtggcaattggctggctgtttgccagttatcaacatgcgcagcaaaaagccgagcaattagctgaacgtgaagagatggtcgcggagttaagcgcggcaaaacaacaaattacccaaagcgagcactggcgtgcagagtgcgagttactcaataacgaagtgcgcagcctgcaaagtattaacacctctctggaggccgatctgcgtgaagtaaccacgcggatggaagccgcacagcaacatgctgacgataaaattcgccagatgattaacagcgagcagcgcctcagtgagcagtttgaaaacctcgccaaccgtatttttgagcacagcaatcgccgggttgatgagcaaaaccgtcagagtctgaacagcctgttgagcccgctacgtgaacaactggacggtttccgccgtcaggttcaggacagcttcggtaaagaagcacaagaacgccataccctgacccacgaaattcgcaatctccagcaactcaacgcgcaaatggcccaggaagcgatcaacctgacgcgcgcgctgaaaggcgacaataaaacccagggcaactggggcgaggtagtattgacgcgggtgttggaggcttccggtctgcgtgaagggtatgaatatgaaacccaggtcagcatcgaaaatgacgcccgcagccggatgcagccggatgtcatcgtgcgcctgccgcagggaaaagatgtggtgatcgacgccaaaatgacgctggtcgcctatgaacgctattttaacgccgaagacgactacacccgcgaaagcgcgctacaggaacatatcgcgagcgtgcgtaaccatatccgtttgctgggacgcaaagattatcaacagctgccggggctgcgaactctggattacgtgctgatgtttattcccgttgaacccgcttttttactggcgcttgaccgccagccggagctgatcaccgaagcgttgaaaaacaacatcatgctggttagcccgactacgctgctggtggcgctgcgcactatcgccaacctgtggcgttatgagcatcaaagccgcaacgcccagcaaatcgccgatcgtgccagcaagctgtacgacaagatgcgtttgttcatcgatgacatgtccgcgattggtcaaagtctcgacaaagcgcaggataattatcggcaggcaatgaaaaaactctctagtgggcgcggaaatgtgctggcgcaggcagaagcgtttcgcggtttaggagtagaaattaaacgcgagattaatccggatttggctgaacaggcggtgagccaggatgaagagtatcgacttcggagcgttccggagcagccgaatgatgaagcttatcaacgcgatgatgaatataatcagcagagccgctaacccattgggagtagttaagccgggtagaaatctagggcatcgacgcccaatctgttacacttctggaacaattttttgatgagcaggcattgagatggtggataagagtcaagaaacgacgcactttggttttcagaccgtcgcgaaggaacaaaaagcggatatggtcgcccacgttttccattccgtggcaagtaaatacgatgtcatgaatgatttgatgagttttggtattcatcgtttgtggaagcgattcacgattgattgcagcggcgtacgccgtgggcagaccgtgctggatctggctggtggcaccggcgacctgacagcgaaattctcccgcctggtcggagaaactggcaaagtggtccttgctgatatcaatgaatccatgctcaaaatgggccgcgagaagctgcgtaatatcggtgtgattggcaacgttgagtatgttcaggcgaacgctgaggcgctgccgttcccggataacacctttgattgcatcaccattagctttggtctgcgtaacgtcaccgacaaagataaagcactgcgtagtatgtatcgcgtgctgaaacccggcggccgcctgctggtgcttgagttcagcaagccaattatcgagccgctgagcaaagcctatgatgcatactccttccatgtgctgccgcgtattggcagtctggtcgcgaacgacgccgacagctaccgttatctggcagaatccatccgtatgcatcccgatcaggataccctgaaagccatgatgcaggatgccggattcgaaagtgtcgactactacaatctgacggcaggggttgtggcgctgcatcgtggttataagttctgacaggagaccggaaatgccttttaaacctttagtgacggcaggaattgaaagtctgctcaacaccttcctgtatcgcagtcccgcgctgaaaacggcccgcagccgtctgctgggtaaagtattgcgcgtggaggtaaaaggctttagcacgagtttgattctggtgttcagcgaacgccaggttgatgtactgggcgaatgggcaggcgatgctgactgcaccgttatcgcctacgccagtgtgttgccgaaacttcgcgatcgccagcagcttaccgcactgattcgcagtggtgagctggaagtgcagggcgatattcaggtggtgcaaaacttcgttgcgctggcagatctggcagagttcgaccctgcggaactgctggccccttataccggtgatatcgccgctgaaggaatcagcaaagccatgcgcggaggcgcaaagttcctgcatcacggcattaagcgccagcaacgttatgtggcggaagccattactgaagagtggcgtatggcacccggtccgcttgaagtggcctggtttgcggaagagacggctgccgtcgagcgtgctgttgatgccctgaccaaacggctggaaaaactggaggctaaatgacgccaggtgaagtacggcgcctatatttcatcattcgcacttttttaagctacggacttgatgaactgatccccaaaatgcgtatcaccctgccgctacggctatggcgatacagtttattctggatgccaaatcggcataaagacaaacttttaggtgagcgactacgactggccctgcaagaactggggccggtttggatcaagttcgggcaaatgttaagtacccgccgcgatctttttccaccgcatattgccgatcagctggcgttattgcaggacaaagttgctccgtttgatggcaagctggcgaagcagcagattgaagctgcaatgggcggcttgccggtagaagcgtggtttgacgattttgaaatcaagccgctggcttctgcttctatcgcccaggttcataccgcgcgattgaaaagcaatggtaaagaggtggtgattaaagtcatccgcccggatattttgccggttattaaagcggatctgaaacttatctaccgtctggctcgctgggtgccgcgtttgctgccggatggtcgccgtctgcgcccaaccgaagtggtgcgcgagtacgaaaagacattgattgatgaactgaatttgctgcgggaatctgccaacgccattcagcttcggcgcaattttgaagacagcccgatgctctacatcccggaagtttaccctgactattgtagtgaagggatgatggtgatggagcgcatttacggcattccggtgtctgatgttgcggcgctggagaaaaacggcactaacatgaaattgctggcggaacgcggcgtgcaggtgttcttcactcaggtctttcgcgacagctttttccatgccgatatgcaccctggcaacatcttcgtaagctatgaacacccggaaaacccgaaatatatcggcattgattgcgggattgttggcagcctaaacaaagaagataaacgctatctggcagaaaactttatcgccttctttaatcgcgactatcgcaaagtggcagagctacacgtcgattctggctgggtgccaccagataccaacgttgaagagttcgaatttgccattcgtacggtctgtgaacctatctttgagaaaccgctggccgaaattagctttggacatgtactgttaaatctgtttaatacggcgcgtcgcttcaatatggaagtgcagccgcaactggtgttactccagaaaaccctgctctacgtcgaaggggtaggacgccagctttatccgcaactcgatttatggaaaacggcgaagcctttcctggagagctggattaaagatcaggtcggtattcctgcgctggtgagagcatttaaagaaaaagcgccgttctgggtcgaaaaaatgccagaactgcctgaattggtttacgacagtttgcgccagggcaagtatttacagcacagtgttgataagattgcccgcgagcttcagagtaatcatgtacgtcagggacaaagccgttattttctcggaattggcgctacgttagtattaagtggcacattcttgttggtcagccgacctgaatgggggctgatgcccggctggttaatggcaggtggtctgatcgcctggtttgtcggttggcgcaaaacacgctgattttttcatcgctcaaggcgggccgtgtaacgtataatgcggctttgtttaatcatcatctaccacagaggaacatgtatgggtggtatcagtatttggcagttattgattattgccgtcatcgttgtactgctttttggcaccaaaaagctcggctccatcggttccgatcttggtgcgagcatcaaaggctttaaaaaagcaatgagcgatgatgaaccaaagcaggataaaaccagtcaggatgctgattttactgcgaaaactatcgccgataagcaggcggatacgaatcaggaacaggctaaaacagaagacgcgaagcgccacgataaagagcaggtgtaatccgtgtttgatatcggttttagcgaactgctattggtgttcatcatcggcctcgtcgttctggggccgcaacgactgcctgtggcggtaaaaacggtagcgggctggattcgcgcgttgcgtagtctggcgacaacggtgcagaacgaactgacccaggagttaaaactccaggagtttcaggacagtctgaaaaaggttgaaaaggcgagcctcactaacctgacgcccgaactgaaagcgagcatggatgaactacgccaggccgcggagagcatgaagcgttcctacgttgcaaacgatcctgaaaaggcgagcgatgaagcgcacaccatccataacccggtggtgaaagataatgaagctgcgcatgagggcgtaacgcctgccgctgcacaaacgcaggccagtagcccggaacagaagccagaaaccacgccagagccggtggtaaaacctgctgcggacgctgaaccgaaaaccgctgcaccttcccctagcagcagtgataaaccgtaaacatgtctgtagaagatactcaaccgcttatcacgcatctgattgagctgcgtaagcgtctgctgaactgcattatcgcggtgatcgtgatattcctgtgtctggtctatttcgccaatgacatctatcacctggtatccgcgccattgatcaagcagttgccgcaaggtagtacgatgatcgccaccgacgtggccagcccgttctttacgccgatcaagctgacctttatggtgagcctgattctgagtgcgccggtgattctctatcaggtgtgggcatttatcgccccagcgctgtataagcatgaacgtcgcctggtggtgccgctgctggtttccagctctctgctgttttatatcggcatggcattcgcctactttgtggtctttccgctggcatttggcttccttgccaataccgcgccggaaggggtgcaggtatccaccgacatcgccagctatttaagcttcgttatggcgctgtttatggcgtttggtgtctcctttgaagtgccggtagcaattgtgctgctgtgctggatggggattaccagcccagaagacttacgcaaaaaacgcccgtatgtgctggttggtgcattcgttgtcgggatgttgctgacgccgccggatgtcttcagccaaacgctgttggcgatcccgatgtactgtctgtttgaaatcggtgtcttcttcagtcgcttttacgttggtaaagggcgaaatcgggaagaggaaaacgacgctgaagcagaaagcgaaaaaactgaagaataaattcaaccgcccgtcagggcggttgtcatatggagtacaggatgtttgatatcggcgttaatttgaccagtagccaatttgcgaaagaccgtgatgatgttgtagcgtgcgcttttgacgcgggagttaatgggctactcatcaccggcactaacctgcgtgaaagccagcaggcgcaaaagctggcgcgtcagtatagctcctgttggagtacggcgggcgtacatcctcacgacagcagccagtggcaagctgcgactgaagaagcgattattgagctggccgcgcagccagaagtggtggcgattggtgaatgtggtctcgactttaaccgcaactttagcacgccggaagagcaggaacgcgcttttgttgcccagctacgcattgccgcagatttaaacatgccggtatttatgcactgtcgcgatgcccacgagcggtttatgacattgctggagccgtggctggataaactgcctggtgcggttcttcattgctttaccggcacacgcgaagagatgcaggcgtgcgtggcgcatggaatttatatcggcattaccggttgggtttgcgatgaacgacgcggactggagctgcgggaacttttgccgttgattccggcggaaaaattactgatcgaaactgatgcgccgtatctgctccctcgcgatctcacgccaaagccaagttcccggcgcaacgagccagcccatctgccccatattttgcaacgtattgcgcactggcgtggagaagatgccgcatggctggctgccaccacggatgctaatgtcaaaacactgtttgggattgcgttttaaagtttgcggaactcggtattcttcacactgtgcttaatctctttattaataagattaagcaatagcatggagcgagcctcaccatcgggttcggtgaaaatggcctgaaagccttcgaacgcgccttcggtaataatcaccttatcacccggataaggggttgccggatcgacaatgtctttcggtttatatacgcttagctgatgaataaccgcgcttgggactatcgctgggctcgcgccaaagcgcacgaagtggctgacaccgcgggtcgcgttgatagtcgtggtatgaatcacttctgggtcaaattccacaaacaggtagttggggaacaatggctcactgactgcagtacgttttccacgcacgattttttccagggtgatcatcggtgccaggcaattcacagcctgtctttcgaggtgttcctgggcacgttgaagttgcccgcgcttgcagtacagtaaataccaggattgcataatgactcttatccgtttaatcggggcgcaaggatagcaaaagctttacgctaagttaattatattccccggtttgcgttataccgtcagagttcacgctaatttaacaaatttacagcatcgcaaagatgaacgccgtataatgggcgcagattaagaggctacaatggacgccatgaaatataacgatttacgcgacttcttgacgctgcttgaacagcagggtgagctaaaacgtatcacgctcccggtggatccgcatctggaaatcactgaaattgctgaccgcactttgcgtgccggtgggcctgcgctgttgttcgaaaaccctaaaggctacagtatgccggtgctgtgcaacctgttcggtacgccaaagcgcgtggcgatgggcatggggcaggaagatgttagcgcgctgcgtgaagttggtaaattattggcgtttctgaaagagccggagccgccaaaaggtttccgcgacctgtttgataaactgccgcagtttaagcaagtattgaacatgccgacaaagcggctgcgtggtgcgccctgccaacaaaaaatcgtctctggcgatgacgtcgatctcaatcgcattcccattatgacctgctggccggaagatgccgcgccgctgattacctgggggctgacagtgacgcgcggcccacataaagagcggcagaatctgggcatttatcgccagcagctgattggtaaaaacaaactgattatgcgctggctgagccatcgcggcggcgcgctggattatcaggagtggtgtgcggcgcatccgggcgaacgtttcccggtttctgtggcgctgggtgccgatcccgccacgattctcggtgcagtcactcccgttccggatacgcttagtgagtatgcgtttgccggattgctacgtggcaccaagaccgaagtggtgaagtgtatctccaatgatcttgaagtgcccgccagtgcggagattgtgctggaagggtatatcgaacaaggcgaaactgcgccggaagggccgtatggcgaccacaccggttactataatgaagtcgatagtttcccggtatttaccgtgacgcatattacccagcgtgaagatgcgatttaccattccacctataccgggcgtccgccagatgagcccgcggtgctgggtgtcgcactgaacgaagtgtttgtgccgattctgcaaaaacagttcccggaaattgtcgatttttacctgccgccggaaggctgctcttatcgcctggcggtagtgacaatcaaaaaacagtacgccggacacgcgaagcgcgtcatgatgggcgtctggagcttcttacgccagtttatgtacactaaatttgtgatcgtttgcgatgatgacgttaacgcacgcgactggaacgatgtgatttgggcgattaccacccgtatggacccggcgcgggatactgttctggtagaaaatacgcctattgattatctggattttgccagccctgtctccgggctgggtagtaaaatggggctggatgccacgaataaatggccgggggaaacccagcgtgaatggggacgtcccatcaaaaaagatccagatgttgtcgcgcatattgacgccatctgggatgaactggctatttttaacaacggtaaaagcgcctgatgcgcgtttgttttgccctatttatcgatccgacagagaaagcgcatgacaaccttaagctgtaaagtgaccagcgtagaagctatcacggataccgtatatcgtgtccgcatcgtgccagacgcggccttttcttttcgtgctggtcagtatttgatggtagtgatggatgagcgcgacaaacgtccgttcagtatggctagcacgccggatgaaaaagggtttatcgagctgcatattggcgcttctgaaatcaacctttacgcgaaagcagtcatggaccgcatcctcaaagatcatcaaatcgtggtcgacattccccacggagaagcgtggctgcgcgatgatgaagagcgtccgatgattttgattgcgggcggcaccgggttctcttatgcccgcagcattttgctgacagcgttggcgcgtaacccaaaccgtgatatcaccatttactggggcgggcgtgaagagcagcatctgtatgatctctgcgagcttgaggcgcttagcttgaagcatcctggtctgcaagtggtgccggtggttgaacaaccggaagcgggctggcgtgggcgtactggcaccgtgttaacggcggtattgcaggatcacggtacgctggcagagcatgatatctatattgccggacgttttgagatggcgaaaattgcccgcgatctgttttgcagtgagcgtaatgcgcgggaagatcgcctgtttggcgatgcgtttgcatttatctgagatataaaaaaacccgcccctgacaggcgggaagaacggcaactaaactgttattcagtggcatttagatctatgacgtatctggcaaaccatgcccgatgcgacgctgtcgcgtcttatcgtgcctacaaatagtccgaaccgtaggccggataaggcgtttacgccgcatccggcaattggtgcatgatgcctgatgcgacgctgtcgcgtcttatcgtgcctacaaatagtccgaaccgtaggccggataaggcgtttacgccgcatccggcaattggtgcatgatgcctgatgcgacgctggcgcgtcttatcaggcctacattggtgccggatcggtagaccggataaggcgttcacgccgcatccggcaagtggttaaacccgctcaaacaccgtcgcaataccctgacccagaccgatacacatcgtcgccagaccaaactgaacgtctttgcgttccatcagattcagcagcgtggtgctgatacgcgcaccggaacaacccagcggatgacccagcgcgatcgcgccaccgttgaggttgatcttctcgtcaatctgctcaattagtcccagatctttaatacatggcaggatctgcgcggcaaaggcttcgttcatttcaaacacgccgatatcgctggcagaaagccccgcttttttcagcgccagtttgctggccggaaccgggccgtaacccataatgcttgggtcacaaccaacgaccgccatgctacgcacacgagcgcgcggcttaagacctaattcatgggcgcggctttcactcatcaccagcatggcagctgcgccatcggaaagtgcagaagatgtgcccgccgttaccataccgtttactggatcaaacgccggacgcagcgtggcgagggcttccacggtggtttccgggcgaatcacttcgtcgtaattaaactgcttcaggacgccgtcggcatcgtgaccaccggtcgggatgatttcatttttaaatgcggcgctctgcgtggcggcccaggcgcgggcgtgactccgcgcggcaaaggcatcctgcatttcacggctgataccgtgcatacgcgccagcatttctgccgttaagcccatcatgcccgccgctttggcgacattgcggctcaggccggggtgaaaatcgacgccgtgactcatcggcacatggcccatatgctccacgccgccaaccagacatgcctgcgcatcgccagtcatgatcattcgtgctgcgtcatgcagtgcctgcatggaactaccacacaagcgattaacggtaaccgccgggacagagtgtggtacttctgccagcagcgccgcgttacgggcgatattaaaaccctgctccagcgtctgctgcacacaaccccagtaaatatcgtcgagggccgccgcttccagcgccgggttacgcgccagcaggctacgcattaaatgagcggagagatcttctgcacgcacgttacgaaaagcaccgcccttgctacggcccatcggggtgcgaattgcatcgacaatgacaacctgttccattgtgactccttaagccgttttcaggtcgccaaccggacgggctggctcaaccggaggatagtacggttcgttatgacgcgctttattacgcagaccttccggcacttcatacagcgggccgaggtgctgatattgctgtgccatatcgaggtattttgcgctaccgagggtgtccagccagcggaacgcgccgccgtggaacggagggaagcccaggccgtagaccagcgccatatccgcttccgccggagtggcgataatgccttcctccagacagcgcaccacttcgttgaccatcgggatcatcatgcgggcgataatctcttcttcgctgaagtcgcgcttcggctggctcacttctgccagcaggtcttcaacggcggcgtcttcttctttcttcggcttacctttgctgtcttctttataacgccagaaaccgaggccgttcttctgaccaaagcggttggcatcaaacagcgcgtcgatggcatcgcggtaatctttctgcatccgctgcgggaagcctgctgccatgacagcctgagcgtgatgcgcggtatcaatgcccacaacgtccagcagatatgccgggcccatcggccagccaaactgtttttccatcactttgtcgatcttgcggaaatccgcgccgtcgcgcagcagctggctgaaaccggcgaaatacgggaacagcacgcggttaacaaagaagccggggcagtcgttaaccacaatcggcgtcttgcccatcttgctcgcccaggcgacaactttcgcgatggtttcgtcggagcttttctcgccgcgaataatttctaccaacggcattcggtggaccgggttaaagaagtgcatcccgcagaagttttccgggcgttccagcgcgttggccagttcgctgataggaatggtactagtgttagacgccagcacggtatcctggcgtactttttgttcggtttctgccagtacggcttttttcactttcgggttttcaacaaccgcttctaccacaatatccacgcggtcaaatccggcgtagtcgagcgttgggtggattgtggagatcacgccagccagtttcagaccatcgatcttgccgcgctcaagctgcttgttcagcagtttcgcggcttcggtcatgccgagggttaagctcttgtcgttgatatctttcatgacaaccggcacgcctttccacgcagactggtaagcgatgccgccgcccataatgcctgcacccagcaccgcggcctgtttcggggtttcaacgtctttggtgagtttcttcgctttgccttttacatattgatcgttaaggaaaatgccgaccagtgcgcgggcttcgttggtatgcgccagcgggacaaaacttttgttttccaggtttaaggcttcttcacgaccaaaacgggccgcagcttcaatggtttttactgcggtgatgggggccggataatgtttccccgctgtttgtgcgaccatccctttagcgatggtgaagctcatggtggcttcaatcttgctcagttttagtggttccagcttcggctgacgttttgctttccagtcgaggtcgccgttaatggcctggcgtaaaaccgcctttgcgccttcaaccagtttttctgctttgactacgccatccaccagaccgattttcagcgcctgatccgcgccgacatctttaccggcggcaatgatttccagcgcactgtcagcgcccagcatacgtggcatacgtacagaaccgccaaagccaggcatgatgcccagtttggtttccggcagaccgatgcgcagatccggcgtcgccagacgataatcggtcgccagcacgcattcgcagccaccgcccagcgcatagccattgacggcagcaatggtcggcaccggcagatcttccaggcgattaaacacgctattggcaaagtgcagccactgacttaactgttcttcaggaacgaggaacagggacaaaaattcggtgatatcagcaccgacgataaaggctgctttgttgctacgcagcagcagcccttttagatcactttgctgttccagcacgccgatggcctcgccgaggctggcgacggtcgcagtgtcgagtttattaacactacctggggcatcaaataccagttcggcaatgccatcttccagccagtcaaggtacagggtgtcgcctttgtaaagcatgtcagtctcctgaatccgcaaggtgatctggtcgtaccagatgagtcgaagtgtgtattttgtgttaaaaatatgcaaacaaaagattaaagaaatgccgatctgatcacgctcggcagaaatcacgctctggatgaacgatgtgctaagatgcggagacttaaggtcaaaaaaacagaagggtaaaaaatggaaagtctggccagcctctataaaaatcatatagctaccttacaagaacggactcgcgatgcgctggcgcgcttcaagctggatgcgttacttattcactccggcgagctgttcaatgtttttctcgacgatcatccctatccgtttaaagtgaacccgcaattcaaagcgtgggtgccggtaactcaggtgccaaactgctggttgctggtggatggcgtgaacaagccgaaactgtggttctatctgccggttgattactggcacaacgtcgaaccgctgccgacctctttctggactgaagatgtggaagtgatcgcgctgccgaaagccgatggcattggtagcctgctgcctgctgcgcgcggcaatatcggttatatcggtccggtgccggaacgtgcgctgcaactgggtattgaggccagcaacatcaacccgaaaggggttatcgactacctgcattactatcgctccttcaaaactgagtacgaactggcctgtatgcgtgaagcgcagaaaatggcggtcaacggtcaccgcgcggcagaagaagcgttccgttctggcatgagcgagttcgatatcaacattgcctatctgaccgcgaccggtcatcgtgataccgacgtaccttacagcaacattgtggcgcttaacgaacacgctgcggtactgcattacaccaaactggaccatcaggcaccggaagagatgcgcagcttcctgctggatgccggggcagaatataacggctatgcggctgacctgacccgtacctggagcgcaaaaagtgacaacgactacgcgcagctggtgaaggacgttaatgatgaacaactggcgctgatcgccaccatgaaagcaggcgtcagctatgtggattaccacatccagttccatcagcgcatcgccaaactgctgcgtaaacatcaaatcatcaccgatatgagtgaagaagcgatggtcgaaaacgatcttaccgggccgtttatgccgcatggtatcggccatccgctgggcctgcaggtgcatgacgtcgctggttttatgcaggatgatagcggtacgcacctcgcggcaccggcaaaatatccgtacctgcgctgcacccgtattctccagccgggcatggtgttaaccatcgaaccgggtatctacttcatcgaaagcctactggcaccgtggcgtgaagggcagttcagcaagcacttcaactggcagaaaattgaagcactgaaaccgttcggcggcattcgtatcgaagacaacgtggtgatccacgaaaacaacgtggaaaacatgacccgggatctgaaactggcgtgatggaaagctggttaattcctgcggcaccggtcacggtcgttgaagagatcaaaaagagccgcttcataacgatgttggcgcataccgatggcgttgaggcggcgaaagcgtttgttgaaagcgtgcgggcagaacaccccgatgcccggcaccattgcgtggcgtgggtcgcgggtgcgccggatgattctcaacagctgggtttctctgacgacggggagccggcgggaacggcaggtaaaccgatgctcgcccagctaatgggcagcggcgtcggggaaattaccgctgtggtagtgcgctactacggcggcatattgcttggcaccggtgggttagtgaaagcgtatggcggcggcgtgaatcaggcgctgcgccagctaacgacccaacgcaagacgccattaaccgaatatactttgcaatgtgaatatcatcagttaaccggcattgaagcgttgctggggcagtgtgacggcaaaattatcaacagtgattatcaggcattcgttctgctgcgggtggcgcttccggcggcgaaagtggctgaattttccgcaaagctggcggattttagccgtggtagtttgcaattgttagcgattgaagaataatccccacttcgttttgcagaactaaggaagcggcagagatgcattttcgcgccattacccgaatcgttggactactggtcatcttatttagtgggaccatgattatccctgggctggtagcactcatctaccgggatggagcgggccgcgcttttacccagaccttttttgtcgccctcgccattggctctatgctgtggtggccgaaccgcaaagagaaaggcgaacttaaatcccgtgaggggtttctgatagtggtgctgttctggaccgtgctgggtagcgtcggtgcgctcccttttatcttcagcgaaagcccgaacctcacgattaccgatgcgttttttgaatctttctctggcctgaccactacgggagccactacgctggtggggctggatagcctccctcacgccatcctcttttatcgccagatgctgcaatggtttggcgggatggggatcatcgtgttggcggttgcgatactgcctatcctcggcgtgggtgggatgcagctctatcgcgcagaaatgcccggcccgctgaaagataacaaaatgcgcccgcgaattgcggaaacggcgaaaaccctgtggttgatttatgtcttgctgaccgtcgcctgtgcgctggcgttgtggtttgccggaatggatgcctttgatgccatcggccatagctttgcgactatcgctattggcggcttcagcacacatgatgccagtatcggttatttcgatagcccgactattaacactatcattgctatcttcctgctgatctccggctgtaactacggtctgcactttagtctgttaagtgggcgtagtctgaaggtttattggcgcgatccggaatttcgcatgtttatcggcgtacagtttacgctggtggttatttgtaccctcgtactgtggtttcataatgtctacagtagcgcgctgatgacaattaaccaggcgtttttccaggtggtgagcatggcgacaaccgccgggtttacaactgacagcattgcccgctggccgctctttttgccggtactgcttttatgtagtgcctttatcggcggttgcgccgggagtacgggcggtggcctgaaggtgatccgcatcctgctgctgtttaagcaggggaaccgtgagctgaaacgactggtgcatccgaacgccgtctatagcattaagctggggaatcgcgcactgccggaacgtatcctcgaagccgtttggggatttttctccgcctatgcattggtgtttattgtcagtatgctggcgattatcgccacgggcgtggatgacttttctgcctttgcgagcgttgttgcgacattgaataacctggggccagggcttggcgtggttgctgataactttaccagtatgaacccggtggctaaatggatcctgattgccaacatgctgtttggtcgtctcgaggtctttacattgctggtgctctttaccccgactttctggcgtgaatgatggagtaatacgtgaaaacattaattcttttcagtacaagggacggacaaacgcgcgagattgcctcctacctggctagcgaactgaaagaactggggatccaggcggatgtcgccaatgtgcaccgcattgaagaaccacagtgggaaaactatgaccgtgtggtcattggtgcttctattcgctatggtcactaccatagtgcgttccaggaatttgtcaaaaaacatgcgacgcggctgaatagcatgccgagcgccttttactccgtgaatctggtggcgcgcaaaccggagaagcgtactccacagaccaacagctacgcgcgcaagtttctgatgaacagccaatggcgtcccgatcgctgcgcggtcattgccggggcgctgcgttacccacgttatcgctggtacgaccgttttatgatcaagctgattatgaagatgagtggcggtgaaacggatacgcgcaaagaagttgtctataccgattgggagcaggtggcgaatttcgcccgagaaatcgcccatttaaccgacaaaccgacgctgaaataagcataaagaataaaaaatgcgcggtcagaaaattattttaaatttcctcttgtcaggccggaataactccctataatgcgccaccactgacacggaacaacggcaaacacgccgccgggtcagcggggttctcctgagaactccggcagagaaagcaaaaataaatgcttgactctgtagcgggaaggcgtattatgcacaccccgcgccgctgagaaaaagcgaagcggcactgctctttaacaatttatcagacaatctgtgtgggcactcgaagatacggattcttaacgtcgcaagacgaaaaatgaataccaagtctcaagagtgaacacgtaattcattacgaagtttaattctttgagcgtcaaacttttaaattgaagagtttgatcatggctcagattgaacgctggcggcaggcctaacacatgcaagtcgaacggtaacaggaagaagcttgcttctttgctgacgagtggcggacgggtgagtaatgtctgggaaactgcctgatggagggggataactactggaaacggtagctaataccgcataacgtcgcaagaccaaagaggggtaccttcgggcctcttgccatcggatgtgcccagatgggattagctagtaggtggggtaacggctcacctaggcgacgatccctagctggtctgagaggatgaccagccacactggaactgagacacggtccagactcctacgggaggcagcagtggggaatattgcacaatgggcgcaagcctgatgcagccatgccgcgtgtatgaagaaggccttcgggttgtaaagtactttcagcggggaggaagggagtaaagttaatacctttgctcattgacgttacccgcagaagaagcaccggctaactccgtgccagcagccgcggtaatacggagggtgcaagcgttaatcggaattactgggcgtaaagcgcacgcaggcggtttgttaagtcagatgtgaaatccccgggctcaacctgggaactgcatctgatactggcaagcttgagtctcgtagaggggggtagaattccaggtgtagcggtgaaatgcgtagagatctggaggaataccggtggcgaaggcggccccctggacgaagactgacgctcaggtgcgaaagcgtggggagcaaacaggattagataccctggtagtccacgccgtaaacgatgtcgacttggaggttgtgcccttgaggcgtggcttccggagctaacgcgttaagtcgaccgcctggggagtacggccgcaaggttaaaactcaaatgaattgacgggggcccgcacaagcggtggagcatgtggtttaattcgatgcaacgcgaagaaccttacctggtcttgacatccacggaagttttcagagatgagaatgtgccttcgggaaccgtgagacaggtgctgcatggctgtcgtcagctcgtgttgtgaaatgttgggttaagtcccgcaacgagcgcaacccttatcctttgttgccagcggtccggccgggaactcaaaggagactgccagtgataaactggaggaaggtggggatgacgtcaagtcatcatggcccttacgaccagggctacacacgtgctacaatggcgcatacaaagagaagcgacctcgcgagagcaagcggacctcataaagtgcgtcgtagtccggattggagtctgcaactcgactccatgaagtcggaatcgctagtaatcgtggatcagaatgccacggtgaatacgttcccgggccttgtacacaccgcccgtcacaccatgggagtgggttgcaaaagaagtaggtagcttaaccttcgggagggcgcttaccactttgtgattcatgactggggtgaagtcgtaacaaggtaaccgtaggggaacctgcggttggatcacctccttaccttaaagaagcgttctttgaagtgctcacacagattgtctgatgaaaatgagcagtaaaacctctacaggcttgtagctcaggtggttagagcgcacccctgataagggtgaggtcggtggttcaagtccactcaggcctaccaaatttgcacggcaaatttgaagaggttttaactacatgttatggggctatagctcagctgggagagcgcctgctttgcacgcaggaggtctgcggttcgatcccgcatagctccaccatctctgtagtgattaaataaaaaatacttcagagtgtacctgcaaaggttcactgcgaagttttgctctttaaaaatctggatcaagctgaaaattgaaacactgaacaacgaaagttgttcgtgagtctctcaaattttcgcaacacgatgatgaatcgaaagaaacatcttcgggttgtgaggttaagcgactaagcgtacacggtggatgccctggcagtcagaggcgatgaaggacgtgctaatctgcgataagcgtcggtaaggtgatatgaaccgttataaccggcgatttccgaatggggaaacccagtgtgtttcgacacactatcattaactgaatccataggttaatgaggcgaaccgggggaactgaaacatctaagtaccccgaggaaaagaaatcaaccgagattcccccagtagcggcgagcgaacggggagcagcccagagcctgaatcagtgtgtgtgttagtggaagcgtctggaaaggcgtgcgatacagggtgacagccccgtacacaaaaatgcacatgctgtgagctcgatgagtagggcgggacacgtggtatcctgtctgaatatggggggaccatcctccaaggctaaatactcctgactgaccgatagtgaaccagtaccgtgagggaaaggcgaaaagaaccccggcgaggggagtgaaaaagaacctgaaaccgtgtacgtacaagcagtgggagcacgcttaggcgtgtgactgcgtaccttttgtataatgggtcagcgacttatattctgtagcaaggttaaccgaataggggagccgaagggaaaccgagtcttaactgggcgttaagttgcagggtatagacccgaaacccggtgatctagccatgggcaggttgaaggttgggtaacactaactggaggaccgaaccgactaatgttgaaaaattagcggatgacttgtggctgggggtgaaaggccaatcaaaccgggagatagctggttctccccgaaagctatttaggtagcgcctcgtgaattcatctccgggggtagagcactgtttcggcaagggggtcatcccgacttaccaacccgatgcaaactgcgaataccggagaatgttatcacgggagacacacggcgggtgctaacgtccgtcgtgaagagggaaacaacccagaccgccagctaaggtcccaaagtcatggttaagtgggaaacgatgtgggaaggcccagacagccaggatgttggcttagaagcagccatcatttaaagaaagcgtaatagctcactggtcgagtcggcctgcgcggaagatgtaacggggctaaaccatgcaccgaagctgcggcagcgacactatgtgttgttgggtaggggagcgttctgtaagcctgtgaaggtgtgctgtgaggcatgctggaggtatcagaagtgcgaatgctgacataagtaacgataaagcgggtgaaaagcccgctcgccggaagaccaagggttcctgtccaacgttaatcggggcagggtgagtcgacccctaaggcgaggccgaaaggcgtagtcgatgggaaacaggttaatattcctgtacttggtgttactgcgaaggggggacggagaaggctatgttggccgggcgacggttgtcccggtttaagcgtgtaggctggttttccaggcaaatccggaaaatcaaggctgaggcgtgatgacgaggcactacggtgctgaagcaacaaatgccctgcttccaggaaaagcctctaagcatcaggtaacatcaaatcgtaccccaaaccgacacaggtggtcaggtagagaataccaaggcgcttgagagaactcgggtgaaggaactaggcaaaatggtgccgtaacttcgggagaaggcacgctgatatgtaggtgaagcgacttgctcgtggagctgaaatcagtcgaagataccagctggctgcaactgtttattaaaaacacagcactgtgcaaacacgaaagtggacgtatacggtgtgacgcctgcccggtgccggaaggttaattgatggggttagccgcaaggcgaagctcttgatcgaagccccggtaaacggcggccgtaactataacggtcctaaggtagcgaaattccttgtcgggtaagttccgacctgcacgaatggcgtaatgatggccaggctgtctccacccgagactcagtgaaattgaactcgctgtgaagatgcagtgtacccgcggcaagacggaaagaccccgtgaacctttactatagcttgacactgaacattgagccttgatgtgtaggataggtgggaggctttgaagtgtggacgccagtctgcatggagccgaccttgaaataccaccctttaatgtttgatgttctaacgttgacccgtaatccgggttgcggacagtgtctggtgggtagtttgactggggcggtctcctcctaaagagtaacggaggagcacgaaggttggctaatcctggtcggacatcaggaggttagtgcaatggcataagccagcttgactgcgagcgtgacggcgcgagcaggtgcgaaagcaggtcatagtgatccggtggttctgaatggaagggccatcgctcaacggataaaaggtactccggggataacaggctgataccgcccaagagttcatatcgacggcggtgtttggcacctcgatgtcggctcatcacatcctggggctgaagtaggtcccaagggtatggctgttcgccatttaaagtggtacgcgagctgggtttagaacgtcgtgagacagttcggtccctatctgccgtgggcgctggagaactgaggggggctgctcctagtacgagaggaccggagtggacgcatcactggtgttcgggttgtcatgccaatggcactgcccggtagctaaatgcggaagagataagtgctgaaagcatctaagcacgaaacttgccccgagatgagttctccctgactccttgagagtcctgaaggaacgttgaagacgacgacgttgataggccgggtgtgtaagcgcagcgatgcgttgagctaaccggtactaatgaaccgtgaggcttaaccttacaacgccgaaggtgttttggcggattgagagaagattttcagcctgatacagattaaatcagaacgcagaagcggtctgataaaacagaatttgcctggcggcagtagcgcggtggtcccacctgaccccatgccgaactcagaagtgaaacgccgtagcgccgatggtagtgtggggtctccccatgcgagagtagggaactgccaggcatcaaataaaacgaaaggctcagtcggaagactgggcctttcgttttatctgttgtttgtcggtgaacgctctcctgagtaggacaaatccgccgggagcggatttgaacgttgcgaagcaacggcccggagggtggcgggcaggacgcccgccataaactgccaggcatcaaattaagcagaaggccatcctgacggatggcctttttgcattggcgcagaaaaaaatgccggatgcgacgctggcgcgtcttatccagcctactcttgcttatccgttctgcttttgcatccactccaccacaaaatcagccagcccctcaacatcattaatatccagtaatgcgacatcaagattaagcggcacatcactggctacagcaataacatgcctgtctatcactaattcttcaggtcgatgtccggctccatcgcgaaacagcacaatctttgcgatctcttcatgcttaaacccttcgaccagaatcaaatccagcttactggtatccattcgacttgcgagaaactgtagatccagctcttcttcgtctggtgtttccgtcatcaaggcccatcgttgctggctggcaacgatggtttgtaccgcgccagccttgcgcagctcatagctatctttgcctggcttatcaacatccatatcatggtgcgtatgcttaatcagccctggacggatccctctggcgcataatgccgggatcagttttttcaaaagcgtagtttttccggtaccactccacgcggcaaaggcgagtaacggtatcatcgtttttcctgccatcgggcaagctcctctggcgtattcacgttaacaaatgcatctttatgatcgctgaaatcaaccgcatgaccgccagccagacgcataaataccattacccggcgttctcctgcttgcagatattccagtaataaaggctcaatagcgcggtttaccagagcaatagtcgggtgatcgcgttcaccgtcatggacccacacgacaggcgcatctttgcgctgatgattaagcctggctgctaaatcagggggaatgtaaggcgtatcgcacgggcaaaacaaaaaccactcaccagcttcctgctgcattacactaagcattcctgccagagggcctgggtaatccgccagactatcttcaatcactttcagaccgcttgcctgatagatttcctgatgacgattagcattaaccacgacgtgagagagctgcgtcataagcgcgtcagcgacatgttgccataatggtttgccgtttaattcaagcaatcctttatctacgccgcccattcgtctggctttaccgcctgccagcacaacgcctgttatcgtcgtcatcagattcaccgatatcgcctcttttattgtgggattgaccctgctaacgtgtctgtctcaagagtaaggagcatcactatgaaatgtaaacgtctgaatgaagttattgaactcctccagccagcctggcaaaaagagccagaccttaacctgctgcaatttttgcagaaactggcgaaagagagtggttttgacggcgaactggcggatttgacggatgacattctgatctatcacctgaaaatgcgtgattccgcgaaagatgcggtgatcccgggtttgcagaaagattatgaagaagacttcaaaacggcgctgttacgcgctcgcggcgtaattaaagagtaaaagcttgtaagcggcgccaccaaaatcatcgtgaaatgatatccttcgtcattcgtaatgttttccggatgatgggatgaataacagcgcttttactttccagacactacacccggataccatcatggacgctctgtttgagcatgggatccgggtggattccggtcttaccccgcttaacagctatgaaaaccgtgtctatcaatttcaggacgaagatcgtcgacgttttgtcgtcaaattttatcgccctgaacgttggacagccgatcaaatcctcgaagaacatcaatttgcgttgcagctggtaaatgatgaagttccggtcgcagcacctgtggcctttaacggtcagactttattgaatcatcagggattttatttcgctgtttttccaagcgtcggtggtcgccagttcgaagctgataatatcgatcagatggaagcggttgggcgttatttagggcgtatgcaccagacggggcgcaaacagctttttatccatcgcccgaccatcggtttgaacgaatatctcattgagccacgcaagctgtttgaggacgctacactgataccttccgggttgaaagcggcattcctgaaagcgacagatgagctgattgccgccgttacagcacactggcgggaagatttcaccgttctgcggctacatggagactgccacgccgggaatattctctggcgcgatggtccaatgtttgttgatctggatgatgcacgtaatggtccagccgttcaggatttgtggatgttgctcaatggcgataaagccgagcagcggatgcaactggaaactattattgaagcttatgaagaatttagcgagttcgacaccgctgaaatcggactgattgaacctttacgcgccatgcgtttggtttattatcttgcctggctaatgcggcgttgggctgatcccgcgttcccgaaaaatttcccgtggttaaccggggaagattactggctgcgacagacggcgacttttatagaacaggcaaaagttctacaagaaccccctttgcaattaacacctatgtattaatcggagagagtagatcatgaaaaagatttggctggcgctggctggtttagttttagcgtttagcgcaagcgcggcgcagtatgaagatggtaaacagtacactaccctggaaaaaccggtagctggcgcgccgcaagtgctggagtttttctctttcttctgcccgcactgctatcagtttgaagaagttctgcatatttctgataatgtgaagaaaaaactgccggaaggcgtgaagatgactaaataccacgtcaacttcatgggtggtgacctgggcaaagatctgactcaggcatgggctgtggcgatggcgctgggcgtggaagacaaagtgactgttccgctgtttgaaggcgtacagaaaacccagaccattcgttctgcttctgatatccgcgatgtatttatcaacgcaggtattaaaggtgaagagtacgacgcggcgtggaacagcttcgtggtgaaatctctggtcgctcagcaggaaaaagctgcagctgacgtgcaattgcgtggcgttccggcgatgtttgttaacggtaaatatcagctgaatccgcagggtatggataccagcaatatggatgtttttgttcagcagtatgctgatacagtgaaatatctgtccgagaaaaaataattcaatgtaaattacataaagcccgtgaatattcacgggctttttttattatttaataaatataaatacattctgataatgcatcctgccgctggacattatttcagcataagtggatattcaaagttttgctgttttatcagggaatatttatatgatacgtaagagtgctacaggtgttattgttgcgttagccgtaatctggggtggtggcacatggtacacaggtacgcaaattcagcctggtgtcgaaaaatttattaaagattttaacgatgctaaaaagaaaggtgaacatgcctacgatatgacgttaagttatcaaaattttgacaaaggcttttttaattcccgttttcaaatgcaaatgacattcgataacggtgcacccgatctcaatatcaagccaggccagaaagttgtatttgatgtggatgttgagcacggtccgttgcccatcacaatgttaatgcatggtaatgtcatcccagcactggcagcggcaaaagtgaacttagtgaataatgaactgacacaaccgctatttatcgccgcgaaaaataaaagccccgtggaagcgacattgcgattcgcgtttggtggcagtttctctacgacattagatgttgcccctgcagagtatggaaagttttcttttggtgagggccagtttacttttaatggtgatggtagtagtttgtctaacctggatattgaaggcaaagtcgaagatattgttctgcaattaagtccaatgaacaaagtaacggcaaaaagttttaccattgattctctggcgcgattagaagaaaagaaatttccggttggtgaaagcgagagcaaatttaatcagattaacattatcaatcacggggaagacgttgcccaaatcgatgctttcgttgcaaaaaccaggctggatcgcgttaaagacaaagattatatcaatgtcaatctcacctacgaacttgataagttaacaaaagggaatcagcaactcggtagtggtgagtggagtttgattgctgaatctattgatcccagtgcagtgcgccaatttatcatccagtataacattgcgatgcagaagcagcttgctgcacaccctgagttagcaaacgatgaagttgctctgcaagaagtgaatgctgcattgttcaaagagtatttaccgttattacaaaaaagtgagccgaccattaaacaaccggtaagatggaagaacgcactcggcgaactaaatgccaatctggatatcagtattgccgacccagccaaatctagtagttccacaaacaaagatatcaaaagcctcaattttgatgtgaagttaccgcttaatgtcgtcacagaaaccgcaaaacagcttaatttatctgaaggaatggatgcggaaaaagcgcaaaagcaggctgataaacaaatcagcgggatgatgacattaggtcagatgtttcagttaatcacgattgacaacaataccgccagcctgcagctgcgttatacaccgggtaaagttgtttttaacggacaggagatgagcgaagaagaatttatgtctcgtgccggacgttttgttcattaaaatactcactcgcctctgctcattcagaggcgagtaaaacttacttattctgacgctgactactcatgagagacgtcagaagccggtctttttcctgccacaaactgttcagccattgctgaaaatggcgcttaaagcttttgtcattgatgtagtcgccatgtaactcatcggcaataggctgtaaatccacatgtacgacaatccgcgtcagtttaccgcttaacatatcgaagaacggctgacggttattgtccggataacacagcgtaacattaagcagtttatcgaattgtttacccagtacatttagcgccatcgcaatgcctgccgcctttggtggcaacaagttttgaaaagtggagtgggtttgctgatgtttttcttgcgtgaaacgggagccttcaacgaaattgacaatggtggtgggatgcaggcgaaacttttcacaagaacgccgagtggtttcaacatctttaccacgtcgctccggatgacgtaataaataagcgcgggaataacgcttcataaacggcatatccaggctccagcacgccaggccaagaaatggcacccaggccagctgttgcttgaggaaatatttattcatcggaatgtgcttacgaaacagcacgcacagtacgacaatatctgcccaactacggtggttacaaataagcagataccagttcttcttacttaacccttccagcccgtgaacttcccattgaaggtgtgggttcagatgcagtaataccgccagaccttcacaccagcaatacatcataaaatcacaaaaacggctaacctttcgccaaatgactggcacaggtagcaatagttttacaatcccggcaatgatgatcgggacggaacaaaaaatagtgaccaaaatggtcaatacgatactcagcaaaagggttatcgcagcgagtattctcgtcataatgaatttattcaaaaggttagccatagacagtgcgctaaagaagcgcaaggcgcagattttagcagaaaacgacccaaataacggatgatccttaaggagaaaaataattcatatctatccacattagaaaaaatcccattatctcaattattagggatggatttatttttaactgcatgaaaaacaaagacaaacatcatgctgtaaaaagcatgataataaattaaaagcgatgtaaataatttatgcacaaagttatccacatgacgatttgcgagcgatccagaagatctacaaaagattttcacgaaaagcggtgaaaaactcatgttttcatcctgtctgtggcatcctttacccataatctgataaacaggcacggacattatggttcagatcccccaaaatccacttatccttgtagatggtagttcttatctttatcgcgcatatcacgcgtttcccccgctgactaacagcgcaggcgagccgaccggtgcgatgtatggtgtcctcaacatgctgcgcagtctgatcatgcaatataaaccgacgcatgcagcggtggtctttgacgccaagggaaaaacctttcgtgatgaactgtttgaacattacaaaagtcatcgcccgccaatgccggacgatctgcgtgcacaaatcgaacccttgcacgcgatggttaaagcgatgggactgccgctgctggcggtttctggcgtagaagcggacgacgttatcggtactctggcgcgcgaagccgaaaaagccgggcgtccggtgctgatcagcactggcgataaagatatggcgcagctggtgacgccaaatattacgcttatcaataccatgacgaataccatcctcggaccggaagaggtggtgaataagtacggcgtgccgccagaactgatcatcgatttcctggcgctgatgggtgactcctctgataacattcctggcgtaccgggcgtcggtgaaaaaaccgcgcaggcattgctgcaaggtcttggcggactggatacgctgtatgccgagccagaaaaaattgctgggttgagcttccgtggcgcgaaaacaatggcagcgaagctcgagcaaaacaaagaagttgcttatctcagttaccagctggcgacgattaaaaccgacgttgaactggagctgacctgtgaacaactggaagtgcagcaaccggcagcggaagagttgttggggctgttcaaaaagtatgagttcaaacgctggactgctgatgtcgaagcgggcaaatggttacaggccaaaggggcaaaaccagccgcgaagccacaggaaaccagtgttgcagacgaagcaccagaagtgacggcaacggtgatttcttatgacaactacgtcaccatccttgatgaagaaacactgaaagcgtggattgcgaagctggaaaaagcgccggtatttgcatttgataccgaaaccgacagccttgataacatctctgctaacctggtcgggctttcttttgctatcgagccaggcgtagcggcatatattccggttgctcatgattatcttgatgcgcccgatcaaatctctcgcgagcgtgcactcgagttgctaaaaccgctgctggaagatgaaaaggcgctgaaggtcgggcaaaacctgaaatacgatcgcggtattctggcgaactacggcattgaactgcgtgggattgcgtttgataccatgctggagtcctacattctcaatagcgttgccgggcgtcacgatatggacagcctcgcggaacgttggttgaagcacaaaaccatcacttttgaagagattgctggtaaaggcaaaaatcaactgacctttaaccagattgccctcgaagaagccggacgttacgccgccgaagatgcagatgtcaccttgcagttgcatctgaaaatgtggccggatctgcaaaaacacaaagggccgttgaacgtcttcgagaatatcgaaatgccgctggtgccggtgcttagtcgcattgaacgtaacggtgtgaagatcgatccgaaagtgctgcacaatcattctgaagagctcacccttcgtctggctgagctggaaaagaaagcgcatgaaattgcaggtgaggaatttaacctttcttccaccaagcagttacaaaccattctctttgaaaaacagggcattaaaccgctgaagaaaacgccgggtggcgcgccgagtacgagcgaagaggtactggaagaactggcgctggactatccgttgccaaaagtgattctggagtatcgtggtctggcgaagctgaaaagcacctacaccgacaagctgccgctgatgatcaacccgaaaaccgggcgtgtgcatacctcttatcaccaggcagtaactgcaacgggacgtttaagcagtaccgatcctaacctgcaaaacattccggtgcgtaacgaagaaggtcgtcgtatccgccaggcgtttattgcgccagaggattatgtgattgtcagtgcggactacagccagattgaactgcgcattatggcgcatcttagccgtgacaaaggcttgctgaccgcattcgcggaaggaaaagatatccaccgggcaacggcggcagaagtgtttggtttgccactggaaaccgtcaccagcgagcaacgccgtagcgcgaaagcgatcaactttggtctgatttatggcatgagtgctttcggtctggcgcggcaattgaacattccacgtaaagaagcgcagaagtacatggacctttacttcgaacgctaccctggcgtgctggagtatatggaacgcacccgtgctcaggcgaaagagcagggctacgttgaaacgctggacggacgccgtctgtatctgccggatatcaaatccagcaatggtgctcgtcgtgcagcggctgaacgtgcagccattaacgcgccaatgcagggaaccgccgccgacattatcaaacgggcgatgattgccgttgatgcgtggttacaggctgagcaaccgcgtgtacgtatgatcatgcaggtacacgatgaactggtatttgaagttcataaagatgatgttgatgccgtcgcgaagcagattcatcaactgatggaaaactgtacccgtctggatgtgccgttgctggtggaagtggggagtggcgaaaactgggatcaggcgcactaagattcgcctgaacatgccttttttcgtaagtaagcaacataagctgtcacgttttgtgatggctattagaaattcctatgcaacaactgaaaaaaaattacaaaaagtgctttctgaactgaacaaaaaagagtaaagttagtcgcgtagggtacagaggtaagatgttctatctttcagaccttttacttcacgtaatcggatttggctgaatattttagccgccccagtcagtaatgactggggcgttttttattgggcgaaagaaaagatccgtaatgcctgatgcgctatgtttatcaggccaacggtagaattgtaatctattgaatttacgggccggatacgccacatccggcacaagcattaaggcaagaaaattattcgccgtcctgcgtttcttctacaggctgcatctcgctaaaccaggtatccagtttctgccgcagcttgtccacgccttgtttcttcaagctagaaaacgtttcaacctgcacatcaccgttaaacgccagtacagcttcacgcaccatattcaattgcgctttacgtgcgccgcttgccagtttgtccgctttggtcagcagcaccagaacggcgatattgctgtctaccgcccactcaatcatctgctgatccaaatctttcagcggatggcgaatatccattagcaccaccagaccttgcaggctctgacgtttttcgaggtattcgccgagcgcacgctgccatttgcgcttcatctcttccgggacttccgcataaccgtacccaggcaagtcaaccagacgcttgccgtcagccacttcaaacaggttgataagctgggtgcgccctggggttttactggtacgagccaggcttttctggttagtcagcgtgttcagcgcgctggatttacctgcgttggaacggcctgcaaaagccacttcaattccggtatcggaaggtaggtggcgaatatcaggcgcactcatcacaaaatgcgtctgttgataattcaaattagtcaaagcggtcgtctccgtcagtcaaagctttgtggcgattatacctgaaccataataaaaggcggatttttcggcgtgagcgttgtaagtaaaagccatacgctttgtgagacattgccgatagtctttatgcgaaatagcagagaaaattctgcgatgcatgtcaaataagctatataaatcagtgaattgcttttatataaaactctgaaaatgtgcaaatactgatggcggttgattgtttgtttaaagcaaaggcgtaaagtagcacccatagagcgaggacgctaacaggaacaatgactcaggatgagggtcaggagcgccaggaggcgaagacagaggattgtcaggaagacaaacgtccggagacgtaattaaacggaaatggaatcaacacggattgttccggctaaaggaaaaacagggtgtgttggcggcctgcaaggattgtaagacccgttaagggttatgagtcaggaaaaaaggcgacagagtaatctgtcgccttttttctttgcttgctttctgttagattccgccgcaaatctatactgaataaaacggctaaaagacgaaccattatgaaaccaagttctagtaacagtcgcagcaaaggtcatgcaaaagcgcgtcgaaaaacacgcgaggagctggatcaggaagctcgtgatcgcaagcgtcagaaaaaacgtcgtggtcatgcgccgggcagccgcgcagcgggcggaaacaccacgagtggcagcaaaggccagaacgcaccaaaagatccacgtattggcagtaaaacccctattccattgggcgtgactgaaaaagtcaccaaacagcacaaaccgaagagtgagaaacctatgcttagtccgcaggcggagttggaattactggaaacggatgagcgtctggatgcgctgctggaacgtctggaagcaggcgaaaccctgagtgccgaagagcaatcctgggtggatgctaaactggatcgtattgatgagttgatgcagaaactcggcctctcttatgacgatgacgaagaagaggaagaagacgagaagcaagaagacatgatgcgtctgctgcggggcaactaacggattgccgccgtgggccttcccgttctgctgataacccttccggttatatgttatctggtgtggttattcgttaaactacagcggttgtcgcggcgacaaaagtggctgcgcaaccggctgatgacccgaaacgggcatccgccggtacgccgtagccgccagagacgccatcggaaggagtgagcatgtctgtacagcaaatcgactgggatctggccctgatccagaaatataactattccgggccacgatacaccagctacccgaccgcgctggagtttagtgaagacttcggcgaacaggcgtttttacaagccgtggcgcgctatcctgagcgtccattatctctctacgtacatatcccgttctgccataagctttgttacttctgcggttgcaataagattgttactcgccagcagcacaaggccgatcagtatctggacgcgctggagcaagaaatcgtccatcgtgcaccgctgttcgccgggcgtcacgtcagccaattgcactggggcggcggaacgccgacgtatctgaataaagcgcaaatcagccgcctgatgaagctgctgcgcgaaaacttccagttcaatgccgatgcggagattagcatcgaagtcgatccgcgggaaatcgaactggatgtactcgatcatttacgcgccgaaggctttaatcgcctgagcatgggcgtgcaggacttcaacaaagaagtgcaacgtctggttaaccgcgagcaggatgaagagttcatctttgcactgcttaaccatgcgcgtgagattggttttacctccaccaacatcgacctgatttacggcctgccgaaacagacgccggagagtttcgcctttaccctgaaacgtgtggcggagctgaaccccgatcgtctgagtgtctttaactacgcgcatctgccgaccatttttgctgctcagcgcaaaatcaaagatgctgacctgccgagtccgcagcaaaaactcgatatcctgcaggaaaccatcgccttcctgacgcaaagcggctatcagtttatcggtatggatcactttgcccgtccggatgacgagctggcggtggcccagcgtgaaggcgtgctgcatcgtaacttccagggctacaccactcagggcgataccgatctgctggggatgggcgtttccgccatcagcatgattggcgactgctacgcgcagaaccagaaagagttgaagcagtactatcagcaagtggatgaacaaggcaatgcgctgtggcgtggtattgcgctaacgcgtgatgactgtattcgccgcgatgtgattaagagcctcatctgcaacttccgtctggattacgcccctattgagaaacagtgggatttgcacttcgctgattactttgcggaagatctcaagctgctcgccccgttagcaaaagatgggctggtggatgtggatgagaagggaatacaggtgacggcgaaaggtcgcttgctgatccgcaacatttgcatgtgctttgatacctatctgcgccagaaagcgcggatgcagcagttctctcgggtgatttaaatagtgaatggcgcttcgtttacaaagtagaaaacgaaagcgccatcaatgtgctgagaacaagattgcctgatgcgctgggcaacaaaacctgttgaaattattgcttttgtaggccggataaggcgtttacgccgcatcaggcatctgagcatgatgcctgatgcggcgctggtcgcgtcttatcaggcctacgactttctccgcatccggcataaacaacgagcttcagctaaacagcccaatcattgcggcacacagcacggcagcaacggcagtttgcggtgtgtggctgtcaactgcgccactcgataccagattaattattgattccagcataatgactctccccgttttccgggcaagatcatactgaacttatcggaacagtaaagcgtaaaataccagcaatttgcgctcaataatcaatctttacacacaagctgtgaatcactccatccccagctcttttaacttacgcgtcagggtgttgcggccccagccgagtagccgcgccgcttcctgtttatgcccctgcgtatgtcgcaacgcggtcgtcagtaacgtccgctccagctctggctgcgcttcggaaagcagattttgatgaccggaacgcagcgctctgtctgcccactgcgcaagaagcgtcgcccagctgtccggttgcatttggctagtactctccgcaaccgtactttcaaacagttcgccgggcaaatcctgaatcaacacttcctgcccggcggccatcaccgttagccagcggcaggtgttttccagctggcgcacgttgcctggccacgccagacgcgtcagagcagcttcggtttccggatgcagtaacttcgcttctacgcccagttcgcgcgcggcaacctgtaaaaaatggcgcgccagacggggaatatcttcccgacgttcgcgcagcggcggcagatgaacgcggataacgttcaggcggtggaacagatcctcacggaacttaccttcctgcactcgctgttcgagattctggtgagtggcagcgataatccgcacatccactttcaccggcgcatagccgccaacgcggtaaaactgaccgtctgccagcacgcgcagcaaacgcgtctgcacatccagcggcatatcaccaatttcgtcgaggaataatgtaccgccatcggcctgttcaaaacgcccctgacgaatggtattcgcgccagtaaacgcgcctttctcgtggccaaacagttcactttcgatcaaatcttttgggatagctgccatattcagcgcgataaacggcgctttggcgcgcggactgtggcgatgcagggcatgagcgaccagttctttaccggtgccggattcgccgttaatcagcacgctaatagaagaacggctaagccgaccgataatacggaacacgtcctgcatggctggcgcttcgccgatgatatcggtcgttgggccgttaagctgaacattacgcggctgctgctgttcctggtaatgactgatagcgcgctcaaccagcgccactgcttcgtcgatatcaaacggtttgggcagataatcaaacgccccttgttgataggcgctgacggcagcatccagatcggaatgtgcggtcataatgatgaccggaagcattggatggcgctgtttaatctgcttgagcagcgccagcccgtccattcccggcatacggatatcactaagcagcacatccggcgttttgctcgccagcgcctccagcacttctgcgccgttctcaaacgtcgtacaggttaaacctgccccagcgagcgcacgttcaagcacccaacggatggaactatcgtcatcgactacccagactatccctcgttgcataaacgtcacctttatttcctgataggcaggtaaacgctgaactcggtatgccctggccaactggtaaattcaattttgccactatgctgatcaatcaaattacgagcgatggataagccaagcccggtgccaccttcgcggccgctgaccatcgggtaaaacagcgtatcctgcaaatgaggcggaatgcccggcccgttatcttccacatcaatccgcgccgccagccggtagcgctcgccgtgtaaggtcagttgaaacgcggtgcgggtacgcagaatgatttcaccgccttccggccccagcgcctgtagcgcattgcgcacaatattcagcaagacctgttcaatttgatccgggtcgtgcgccagttccggtaggctgggatcgtaatcacgaatcaaccgcacgttgtccggcagttccatgctcaccagcgttaccacgcgttcagccactttgtgaatactttcggtaacgcgcgtaccgggcagctgcggccccaacagacggtcgaccagatttcgcagccggtccgcctgttcgataatcactttggtatattcgagtagacttgggtcaggtaacgctttgctgagcagctgcgccgcgccacgtaaaccgccaagcggatttttaatctcatgtgccaggccgcgcactaaatcacgggcagcaacctgctgggcgtgctgtagctgttcctgacttaagcggcgctggttatccatcggagccatctccagcaggatcatgccgtccggcatacgctgggccgtcacagaaaggatatggctgcgcccgtcgatgaccagcgtcacttcgttatcggtaaaaccttgccccgcctccagactttcttgcatcagctcgatatttaaactgaagtagctcaacagttccggtaacggtgtaccaaacaatttgcgggagctttgggcgagcagttgttgcgcggcagggttggcgtaatggatcgccaggttgtcatcgattaacaaaatactgttaatcaggctgttgaggatctgcccagcatcgggctgcgtgcctgttgccataaagcagtctcctgaacaggttgcaccattttagtgcattatagctttttacggataaaaagcgcgaagcatcagagaattgacggagaaaaaagcccatgcagagatgggctacagatagctgacaaacttcacgttggagagcgactcacctgctccggcctaccacatcatcaccgtgtaggccggataagacgcatttgcgtcgcatccggcgtgatgtgcttgccaccgatcccaggcctgccagagacaggcgaaaagtttccacggcaactaaaacacttagacgctgtagtacagctcaaactctaccggatgcggagtcatacgcacgcggtcatcttcttcgcgacgcagagcgatgtacgcatcaattgcttcgtcagtgaacacgccaccggctttcaggaactcgcggtccagatccagttcgttcagtgcttcttccagagagcctgcaacctgtgggatctctttcgcttcttctggcggcaggtcatacaggtttttgtccatggcttcgcccggatggatcttgttcttgataccatcaagaccggccatcagcagggcagcaaagcacaggtacgggttagctgccggatccgggaaacgtacttcgatacgacgtgctttcggagaagaaaccaccggaatacggatagacgcagaacggttacgcgcagagtaagccagcattaccggtgcttcatagcccgggaccagacgcttataagagttggtggtcgggtttgccagggcgttaatcgctttagcgtgtttgattacgccgccaatgtagtacagcgcctgctcagacagacctgcgtatttgtcgcctgcgaacaggttaacgccgtttttagacagagacatgtggcagtgcataccggagccgttatcaccgaacatcggttttggcataaaggtcgcggttttaccgaagcggtgcgctacgttgtgcacaacatatttgtagatctgaatttcgtcagcttttttggtcatggtattgaagcgggtagccacttcgttctgaccagcagtcgctacttcgtggtgatgggcttcaaccaccagacccatctgttccatcaccagacacatttcagaacgaatatcctgagcgctgtctaccggtggaaccgggaagtaaccgcctttcactgccggacggtgacctttgttaccaccttcgtattgggtggaggagttccatgcgccttcgatatcgtcgatagcaacgtgggaaccggagatagaacttccgaaacggatgtcatcgaacaggaagaattcaggttctggcccgaacagtacggtgtcggcaatgccagtggaacgcaggtaatcttcggcgcgcttcgcaatggagcgcgggtcacggtcatagccttgcagggtgccaggttcaaggatgtcgcaacggataatcagggtggagtcggcgaagaacgggtcaatcactgcggtggatgcgtctggcatcagcaccatgtcggactcgttaatgcctttccagccgccaatgctggagccgtcaaacattttgccttcttcgaagaattcagcattcacctgatgagcagggatagtgacgtgctgttctttacctttagtatcggtgaagcgcaaatcaacaaacttcacttcgtgctcgttcagcatcgtcagtacgtgttcagcggacatactttaactctcctggattggtcatggtcgtcgtggtaacgaaatctgcaattattttggccgtgtcgccgtaaaaaagataaagcgaaatctgtgccaacttttaaattgcccctaaaaggcgttatcatgcgcaccatcgtgcaaaagggctgcaccacgatgtgaatgttgcaccaatatagtgcttcaatggaaacattaagcaccatgttggtgcaatgacctttggataaccctttttatgctccgtgaaagcgatcacaaagggactctgcaatacttgtttgcggaggatgtttgtgatcctgttttgtagtgcgattaatccgtgtacaataacgcgctatttctaatgcctgaggcaaagttgtgatcgaaaaattgcgtaatatcgccatcatcgcgcacgtagaccatggtaaaaccaccctggtagacaagctgctccaacaatccggtacgttcgactctcgtgccgaaacccaagagcgcgtgatggactccaacgatttggagaaagagcgtgggattaccatcctcgcgaaaaacaccgctatcaaatggaatgattaccgtatcaacatcgttgataccccggggcacgccgacttcggtggtgaagttgaacgtgtaatgtccatggtagacagtgtgctgctggtggttgacgcatttgacggcccgatgccgcaaacgcgcttcgtaaccaaaaaagcgtttgcttacggcctgaagccgattgttgttatcaacaaagttgaccgccctggcgcgcgtcctgattgggttgtggatcaggtattcgatctgttcgttaacctcgacgcgaccgacgagcagctggacttcccgatcgtttacgcttctgcgctgaacggtatcgcgggtctggaccacgaagatatggcggaagacatgaccccgctgtaccaggcgattgttgaccacgttcctgcgccggacgttgaccttgacggtccgttccagatgcagatttctcagctcgattacaacagctatgttggcgttatcggcattggccgcatcaagcgcggtaaagtgaagccgaaccagcaggtcactatcatcgatagcgaaggcaaaacccgcaacgcgaaagtcggtaaagtgctgggccacctcggtctggaacgtatcgaaaccgatctggcggaagctggcgatatcgttgcgatcacgggccttggcgaactgaacatttctgacaccgtttgcgacacgcaaaacgttgaagcgctgccggcactctccgttgatgagccgaccgtttctatgttcttctgcgttaacaccagcccgttctgcggtaaagaaggtaagttcgtaacgtctcgtcagatcctggatcgtctgaacaaagaactggtacacaacgttgcgctgcgcgtagaagaaaccgaagacgccgatgcgttccgcgtttctggtcgtggcgaactgcacctgtctgttctgatcgaaaacatgcgtcgtgaaggtttcgaactggcggtatcccgtccgaaagttatcttccgtgaaatcgacggtcgtaaacaagagccgtatgaaaacgtgactctggacgttgaagaacagcatcagggttctgtaatgcaggcgctgggcgaacgtaaaggcgacctgaaaaacatgaatccagacggtaaaggccgcgtacgtctcgactacgtgatcccaagccgtggtctgattggcttccgttctgagttcatgaccatgacttccggtactggtctgctgtactccaccttcagccactacgacgacgtacgtccgggtgaagtgggtcagcgtcagaacggcgtactgatctctaacggtcagggtaaagcggtcgcgttcgcgctgttcggtctgcaggatcgcggtaagctgttcctcggtcacggtgcagaagtttacgaaggtcagattatcggtattcatagccgctctaacgacctgactgtaaactgcctgaccggtaagaaactgaccaacatgcgtgcttccggtactgacgaagccgttgttctggttccgcctatccgcatgactctggaacaagctctggagttcatcgatgatgacgaactggtagaagtgactccgacctctatccgtattcgtaaacgtcacctgacggaaaacgatcgtcgccgcgccaaccgcgcaccgaaagacgattaatttcgttttttagtcataaaaaacctgccagcgatggcaggttttttttgcctgtcgtgagcgcacaccaatgcgagtatctcccttataagtctgtggttacgtcaatagagagctttgtcacaattatctgcaaagtcatacgccgttaattgctttcttttttggcgtaagcgtaagatgcttcatctggtttaaaccaaaaggattaaacaatggcggagaatcaatccaccgtagaaaatgcaaaagagaaactggatcggtggttgaaagatggcatcaccacgccgggtggaaaactccctagtgaaagagagctgggagaactgctgggcattaaacgtatgacgctgcgccaggcgttgttgaacctcgaggcagaatccaaaatcttccgtaaggatcgtaaggggtggttcgtgacccagccgcgatttaattacagtccggagctgagcgcgagctttcagcgggccgcaattgagcaagggcgagagccttcctgggggtttaccgagaaaaaccgtaccagcgatattcccgagacgctcgcgccactgattgcagtgacgccaagtactgaactctatcgcatcaccggctggggggcgctggaaggacataaagttttctatcacgaaacatatattaatcctgaagttgctccgggctttattgaacaacttgaaaaccacagtttttctgcagtctgggaaaagtgctaccaaaaagagacggtagtaaaaaaattgattttcaaacccgtcagaatgccgggcgatatcagcaagtatcttggcggttctgcgggtatgccagcgatcttaattgaaaagcatcgcgccgaccagcaaggcaatattgtccaaatagatattgaatattggcgatttgaggccgtagacctcatcattaatctgtaagtgttttatggtgacaataaataacgcaagaaagattctacaacgtgtcgacactcttcctctttatttacatgcttatgcctttcatttaaatatgcggctggaaagagtgttgcctgctgatttacttgatatcgcaagtgaaaataatctacgtggcgtcaaaatccatgttctcgatggcgagcgtttttctcttggtaatatggacgataaagaactctctgcctttggggataaagcccgccgtctgaaccttgatattcatattgaaaccagcgccagtgataaggcatctattgacgaagccgtcgccatcgcgttgaaaactggggcaagctccgtacgtttttatccacgttatgaaggtaatttgcgcgacgtattaagcattatcgctaacgacattgcctatgtacgggaaacgtatcaggacagcggcctgacttttacgatcgagcagcatgaagatttaaaaagtcatgagctggtgagcctggtcaaagaaagtgagatggaatctctttccttactgtttgattttgcgaacatgatcaatgcaaatgagcatcccatcgacgctttaaaaacgatggcaccgcatattacccaggtccatatcaaagatgccttgatcgttaaagaaccgggtggcctgggtcataaagcctgtattagtggtcagggtgatatgccgttcaaagcgttattaacgcaccttatctgcctgggtgatgatgagccgcaggtgacggcatatggcctggaagaagaggttgattactatgcgccggcgttccgctttgaagacgaagatgataatccgtggatcccttatcgccagatgagtgaaacaccattgccagaaaatcatttactggatgcgcggttacgtaaagaaaaagaagatgcaattaatcagataaatcatgtgcgtaacgtactacaacaaatcaaacaagaggcaaaccatcttctgaaccactaataagttttaactcatacgcagttaataaaaccattccatatgaatggtcggtatcttattgcctttaaaacagtgattttaaaaatcgcttaggggatgttatgctcacgaaaaagaaatgggcgttatttagtctattaacactgtgtggcggtacaatttataaattaccgagcctgaaagatgcgttttatatcccgatgcaggaatatttccatttgaccaatggtcaaattggtaatgctatgagcgtaaacagttttgtcaccacagtgggcttttttctgtctatttattttgccgataaactaccgcgcagatacaccatgagtttcagtctcattgcgacaggattactgggtgtttatttgacgacaatgccggggtattggggcatcctctttgtctgggcgctatttggcgttacttgcgacatgatgaactggccggtcttgctcaagagcgtaagtcgattgggcaatagcgaacaacaaggtcggttgtttggcttcttcgaaacagggcgtggcattgtcgataccgtggtggcattttctgcgttggcagtatttacctggtttggcagtggcttattaggttttaaagcaggcatctggttctattcccttattgtgattgccgtaggcattattattttctttgtcctgaatgacaaagaagaggcaccgtccgttgaggtgaaaaaagaagacggagcaagcaaaaacaccagtatgaccagcgtgctgaaagacaaaactatctggcttatcgcttttaacgtcttcttcgtttacgcggtttactgtggcctgacattcttcattccattcctgaaaaacatctatctattgcccgttgcgctggtgggggcttacggcatcattaaccaatactgtctgaaaatgattggtggaccgattggtggcatgattagtgataagatcctgaaaagcccaagtaaatatctatgctacacctttatcattagtaccgctgcgctcgtactgttgattatgctgccgcacgaaagtatgccggtctatttagggatggcatgtacgctgggctttggcgcgatagtctttacacagcgagccgtattttttgcacctatcggcgaagcaaaaattgctgaaaataaaacaggtgcggcgatggcgttgggtagctttattggttacgctccggcgatgttctgcttcagtctgtatggctacattctggatttaaatccggggattattggctacaaaatcgtgtttggcattatggcctgcttcgcattcagtggtgcggtggtttccgtaatgctggttaagcgtattagccaacgtaagaaagagatgctggcggctgaagcttaattaatggccggatgtgcttaatccggccaacgaaaaccgtatcaaccgtaggccggataaggcgtttacgccgcatccggcagtttcacatcagaagaaatacttcgtcccgatacggatctggttttgctcgcggtggtacggttcgacgttgcggtctaaccagcgcaattcgaaataagggagccagtgttcattaatacggtaacggaaggtgttagtgatttcccaatgatgatctttcccgttgctactattaaagtcattcactcgcatgaagtaatgtggctcaaatgtataggaaaatttatcggtgattttaaaattccagtaggtgccaatttcataggtgtcattattatccagttccccgctcaaatctgtactactatagttattatggttatagcgatttcgtactgtcagattaaaccatggtacaaatttatagttgacgtccagatacactgcaccaccgctaccgatactcttatcattaattaagccaccgggctggatggttaatttatcggttggtttaaataacggataccagccttcaatttcgttatatccatgttttagttcatcttctcgctgaaagttgtaggtattggttaacataatacccgcgcccatatcgaagttataacccacacgtagcataacctcgccctgatcggaggcaagattatatgcctccctgttttcgacgtatgcgccagcaaatacgctggcagaggtcagagaagataataaaattattgcattaatctttttcataataagtccattttttaaacgtagggaggccgccacccaccaggatggaaatagcggctattgacatttataacgttacggaagccgttttttcttctgtcgccatctctttatttttgcgttggttgatttcctcaataatcaatgcaaaccgtttttcattgagtgtgtaaaagaatcccatcgtcaatgcagcaataattgccagtgcacaaggccagataaaaatgagctgacgcaaaccctgtaatgtcgcatcgctttgcgcgatgttgggaacataaccaatttgcgtcagcataatgcctggcaagaagccagcaagtgcggcagaaattttacgaaagaaggtataaccggtataaacagaaccttcggcacgaataccggttttccattcaccgtaatctacggtatctggtaccagtgcccagttcaggctgtttacaaaggccgtgccaaaaaaggcgacacaagagaacatgacgaaagtgaaagagttacttccccagaaataattcagtatatcacccaccgcccacagcaccatgccagccagataaacctgttttttaccaaaacattttacagttaatggcaccagtaatacgccgatgaggatgcatcccatactgaagaatcccatccagctcaataaattaatatcattcagcacatactgggtgtaatagacctgaatcgccagtttgatattaaatgccgccagggtacacaagttagcaatgcataaaaccagcaatggcggattccgaaatatcgcgcaaaaacttttgagaatactggctttatgtccggttggcgttgtgtccacataatgctctttgacgcctctgtagcacagcatcataaaaataaagccgccaatggagaacataagtgccgcacaggcataaccgacggtactgtcagaaaaaaggctctgcaacggaataaacgccacggtacaaatcaatagccctatggttgcaccaccctggcggtaagccgcgagctgcgcgcgctcattcgggtttttggtaattgccgggatcatcgcaccatagctgcagttcatcagactgtaactaagtccaaacatcataaacagcgcggtggcaatcgtcgttttaaccggcaaacaaaaggtggtggcgataaactggagcgttgcaattaacgccgccggaaccgctgcatataaaataaagggacgaaatttgcctttaggcccaatatttttccggctgtcgagtaaaaatccggtgagcatatcggtaaacgcggtaaaaaacttcgccaccagaaagataatcccgccatagtaagcaggcatccctaattcatcggtataaaatttgaggagatacagagtaccgatgcagagcattaaattgctaccgacgtcgcccataccataggcgattttttcccgcagattcagttttaatgtcagtggattatggtcagacataatcactccttataacgccccgcagggcgtcgtttattattattacgccgtgcgtttacgggcttctatctcttccacaatgcggacatacatcttctcgttcaggctgtagaagcaacccatcgccacaatggtgactaccgccagtgcgcttgggtagatgaagatcaactggcgtaacccttcaatggtgtggtcagcctgtgcgacgttcggcacatagccaatttgcgtcagcatccagccggggaagaaaccagccagcgcctgagacactttgcgaaagaaggtaaaaccggtgtagaccgttccttcgctacgcacgccggtgcgccactcgccgtactcgacggtgtcggaaaccagcgcccagttcaggctgttaacaaacgcactgccaaagaacgccaggcaggagaacgccacgaagctgacgctaccgccgccgaagaaatagttgagcagatcgcccagcacccaaatcagcaggccgccgatataaactttcttcttgccaaaacgtctgacactggcaggcatcaggaatacgccgatgaaaatacagcccatgctgaaaaatcccatatagctcaacaggatgggatcgttaagcacgtactgggtgtaatagacctggatggcgagcttgacgttaaacgcccctaaagtgcagaggttggcaatgcacagaatgaacagcgggcggttacccgcaattgcgcggaaagattgcagcaggcccggcttttgcgccggattagcaggctgggtttcgacataacgctctttcacgccgctgtagcagatccacataaacagcaggccaaacagactaaacagcgtggcggcgaagatatagccaagttgctgattaccttcgataagattcataactggcacgaatcccaccgtgcacagcagcaggcccagcgtagcgccgccctgacgccatgccgccagactggcgcgttcgttggggtttttggtgatagcgggaaccattgcgccgtaggagcagttcatcatgctgaaaaacagtccgtaaagcataaacagaatagtggccatcaccgttttaccggtgacatcaaacggtgtgccgacaaagttggcgatcgccagtaaggtgaccgggaaactcgcatacagaataaaaggacggaacttaccttttggaccgatcttgcgtcgggaatccaacataatgccggtacccatatcggtaaacgcagtaaagaatttactaatcaaaaagataatgccgccataggtgcctggcagccccagaacgtcggtataaaacttcaaaagataaagcgtaccgatatccagcaggatgttagaggccaggtcgccaataccgtaagagagtttctctttaaagggcaggcgtaaagttgctggatcttccgttgtgatgtgactcatgcttgttctccctttgcccatgagtttccccacgggcggatgtgattagatgctttttaagctcgcgaacagtgccgcccattcgctatcggcgcgataaaagaccggcggcttgccgatgggcgcattaacggtaacttccccgccccggaacgcttcacccgtccaggcgtggacccagttatcctccggcagatagagcgtccagtcgctacggccttcttcatgcaccggagcgaccagaatgtcgcgacctaacaggtactgatatttcagggtgtaagtgtgcgcatcgtcttcgtaatgcaggaacagcgggcgcataaccggcaggccggacttcgcattcagcgcgacggcctctttcaggtaaggtttcagggtggtgaagacggtggtcatacgggcgaaatgggcgatggtttctgcgtcgccgtcaaactgccagttgtcgccaggacggttaccttcgtgggtgcgcatcatcggcgtgaaggcgctgaaatcgcaccagcgcagcagcagctctttgctgcgcttcatctcaaacagggtggtgtaaccgccaatgtcgctgtggtgcaggccatgtccggtcattgccaggctcagcgccgccgggacaacgctcgccaggccatcgtcgagactccagtcgacgttctggtcgcccgcccacatcatggtggagtatttctggctaccggtagaaccggcgcgcataaagaaaaggatctcgccgagcttgcccgtttcttcaagggcttcgtagttacacttcgcccacagcgcaggccaggcgttatgcataatttcggcactgacgccgttatgcaagtacgtgtcggtgggcagatactcgccgaagtcagccatccagccgccgcagccgagttcaatcatgttctttttgatcacttccttgaaccaggcgtaggcttctggattagtgagatcgacaacgccgccgtaaaactcgccaaactccaccagatagtcaccgccagaggcatcttttgccagatagccgtgttgtgccgcttcttcgcagagatctttatcgctggcaacatacgggttgatataggccaggaactgcacgccctcctgattccactgcttaatgcgactatccagttgcgggtagttttcgctgttccacttccagttccacatcacgcgtttgccaaaagaggtcatacgaataccggaccagtcctgcgcccagatgccgttgaccttcacgcccgcgttacgcatggtgtccagtttcttctggcacacttccgtcccgccctgaatgccgagcgttactccgtcataaatccagtcgggcagttctggctggcgtcccagcagggcggttaatttttccagcagggaaatgtatgtgtcagcacattcaaaacgcagcgttgctttgtcttcccacagcgccagttcatggtattccggggcactaaagtcgaagttcatatagcaactgttatcaacatggcagtaatacttctgcgtgctgacaaacgtaggctgtgggaagaaagtccagtaatagtcgccgcccgcattttctttgcagtcggcctgccaggtgacataggtttgtttgttgcgaccaacgccttgttcactggtccatagcgggaacggtttgccacgcagatcgaagtaggaaaactgttcgccgcagccgtagatatggtcctctggttgagcggcaaggcgcagccagatacggttgtggttaaggttgtcgttttgtagttccagcaataaacgcccctgatcgtcggcagagatattcagcgtggcgctaatgtcagaaccacggctgaaatgaattaaccaaccatccggactctggctgacgatggcgtcggtaagcgcaattttctcctgtagtttatctttaatgctgaaattaccgcggaacatatcgatatccgctataccactgccaatccataaacaaggattatctttgctatgggttaaaataagacgttgttgaaaatgtagggtaaaactgtcgttattctgatgaaattgaaaatctaataactgtggacgtggcgtatccataactaatctccatagagttgagaacgagattgttgccttcctgttattacaggcttatgtaaaatgattctcataaaactgatatataaaaactttacagaagctgagctgtttttaacttaataaattgaagatacataatgttgcctttagcgagtgaaatgttcttcaatgattttgactgctaatcaatacaagttattttctctgtccgtaaatattaaaaaacaggcggtgcggttttccactttccagtaataataagtcgataccactattaaaggcgttaggcgggcaactcataggttcaactgccagtccctgacgctgtaatttttcaccgctataaacctgcacccagagttgatcggaacaaaggcttacgctaagcgcctgctgtggatgggtaatggtcatttcccacaaatcattagcggttttaaaggtgtggtcgatttttgtcgcggctatttttttcgcctgcgtgaaatttaaatccagctcatcaacgtggtgaagcgttgtcggattcgcgtgctcatcgacggcataaacctggtttgccggaagctggaacagatattcatcaacagatgttaagttgcaggttaaataaggatgaatacccacgccataaggcgctgcgacagtgccgatattctggcttgcgatctcaacggaaagacccgtgtgtgcgttgaggctataaacaacttgactagccagcataaacggatagccgtaactgggcggcagaaaagctgtcagggtaacgctggtggcggttaattcactaatttgccagtctcgccaggcaagcagcccgtgaatagcggctttactactatgttcattaatgggtaactgatattcctgcccctgatagcggtaacagccgttggcgatccggttcggccacggaataagcactttacccagatgcgccagcggcatctcttcgggtttgtgcgggatgactaaatgacaaccctgaaaggttaattcagccagaccagcaccgacggtcacaatggtcgcgtgataatcccccgcggcaagactaacggtctgtccactgcaatgcatattggtgatttgcatacaaggcaccttaattaagctcatacagcctcccgtgaggctgatgtcaaacccaaaaactgcaccggacggtcccctcgcccctttggggagagggttagggagaggggaaaacccgcaccctattttcagatcagttatttcgcattaatatccagcagacccgctgcaaccgctggagccatgccgggcgctaacgggatacgcgggatcaccaggcaatgcagcaggtgataaatatcctgtttgccgtcccagactttggtggtgaccttattgtccgcatccagctcctgccaccaggaaccattttcatagtccatcaggtacttaatgcagtactcccaccatgtttgataccaggtttcatactggcgatcgccagtgacggtgtagagcgcgtaggccgtacccattgcttcgacgataggccaacgtacacgttcgcggaccaccggttttccttcccagtcaacggtataaacaatcccgtccgcgccatcgggtgcccaggcatcgcgcacggtggcgttaaacagacctttggcatcttctagcagccatgctggtggttgttcgcaacgggcttccagggcagcatggatgtgcagcattaaacggccccattcgatccagtggcctggtgtacctccgaacgcgcggaagcgatgcgccgggttatctttgttgtaatccggcagcggattccactgggtatcgaagtgttcgttaacgcgataatgattatttctggcgacgtcgtggataatcacggaagccacgcgaatcgcgcgatccagccattttttgtcgtgagtgacgtcataaacaatcaagaaagcttccaccgcgtgcatattggcattgccgccgcggtactcttcggttttgctgaaggcttcgtcccaggattccaggcacatctgctcttcttcgctccagaaatatttctcgataatttcaatggtgtaatcgagcagcttgcgcgcttccgggtgacccgttgtgacggcgctggcggcacccagcagagcaaagaagtgttgatagccctgtttggaggcatccaccacgccctcgtcattcacgcaggcataccagccgccatattttttatcacgcagtgcgccgttcatggctttgataccgtgatcaaccaagctgtaagcgccaggtcgacccatcgccgcagcaacggaataaacgtgcaacatacgagcggtgatccacagatgggtgcccatctcttctttgatttgccctttattgcctaaccagccaaaaccagtcggcactacggaatttttaccaaaatcaaagatgcggtcggtttcctgttccagccaacggttgtggcttagggtgttaaaccatttcattccttttatcctcatcttagcggcgtttagccatcatttcgtcgacgatatcgccaagttgttgtaatttcggtgcgcaaacgtcacgcagcatcagctcgttgtctggtaaaccgacgacgcttgcccagactgcacggcctgccaggaatccgcttgcgcccgccgtcattgccacgcgtacggcacgcgggaacagtttttcgtcgacaccggaagagaggatcacccatggcatattgatatggtcattcagacgttgactagcacagagaagctcttgttgcggacctttgccataaagcggcatttcaactttgtagaggtcagcgccactgtcgcccagctctttggcggcatcgatgatcgcttgttcgcgatcgaatttatcgccacgacgcggtgggcggacgactggctcaatgatgcttaccagaccgtgactgtggcacagttcgttgaactctttcaccatatccagacgttgctgcgcatcttcatcactacgccacagcaccagcagttttaaggctttgccaccgtcttgtttgatctgtagcggattgattttgcggtcaataaccacgctatcgaccggaataccgttgccaggaatgaactcatcggcggcgacaatcatggcgcaacttttggcaatcgcgttttgctcaaccacctggcggtagcagaattgttgatctaccagaatcgcgctggcataagggctgagggcctttgcagcgttaactttgaaatcagttaaaacgctatcggctaccggagcgggtgccccagccgcggcaaacatcatgcgcatggcttcgcgctgatcgaccgccagcatggcaaaaccgccgcttgcgcgcgtaatgtcgttgatggtgtacttattcattcatttattcctttatccagtcgttacatttttactttggcagtcatcccggcactgacacggacctgttccagaatggcggaccagtcctggcgaccgcgacccgctgcgcgcgcctggctataaacctcccgactggcggcccccagcggcattggcacatgcagctggttggcgacatcaagggcgatgccaagatccttatgggcaagatcgatcatgaaggcgggagaaagatctccgctgaggactttgtttggccaggaagtggtgaagtgacctttaccggcggcggtaccgctcatcactttgacggcaacatcgaagggaagattcagggcttcgcacaaaacggcggcttctgcgctaagcgcattgagcgcgatgctcatgtagttgttgatgagcttaacgcggatccccatgcccggaccgccagcgttgatcaactcactgcccatcgccatcaggatcggtgtggcacgttcaacttgttcagcggtgccgccagccagcagtaacagagtaccggtaatggcatttgcagaagtacggcctaccggaacatccatcatgctgaagcctttggcttgcatatcggcaatcaatttatcggtttgcagcggatggatggtggacatatcaatgaccagcgcatcggtagataagccttcgcaaacgccgttttcaccgaacaacacgttgcgcaccagatcgccattcggcaacatggtaatgataaattcggcatctttagcggcctgcgccgggttggcggcgggagtcgcacctttgtctaccagatgccgcacagcttcggcgttcacatcaaagacgcgaagttgatgcccttgctgcaataaattgctcgccattgggctacccatttgtcctaaaccgataaacgcgattgctgccataaccctctcctgaatacagttatgtcactttttgtcatttatgacatgctttgcttgtctgtttttgatcgtatttgtaatttatcgtcaaaaaattgacagccgtcactttttaaacaattggtgaaattaaaatgaacgcatcccaaaatgtttaaggaatgaccatgattcgtgttgcttgtgtaggtataaccgtgatggatcgcatctattacgtggaagggttaccgacggagagcggtaaatacgtggcgagaaattatacggaagttggtggcgggccagcggcgacggcagcggttgcggcggcaaggctgggggcgcaggtcgattttattggtcgcgtaggtgatgacgacacgggcaacagcctgctggcagagctggaatcctggggcgttaacacccgttacaccaaacggtataaccaggcgaaatctagccaatccgccatcatggtggataccaaaggcgagcggataatcattaactaccccagcccggatctgctgcctgacgcagagtggttggaggaaattgatttctctcagtgggatgttgtgctggcagatgtacgctggcacgacggcgctaaaaaagccttcaccctggcccgtcaggcgggtgtgatgaccgttctggacggggacattacgccgcaggatatcagtgagctggtggcattaagcgatcacgcggcctttagtgaaccgggtctggcgcgcttaacgggcgtgaaagagatggccagtgcgctaaaacaggcacaaacgctcacaaatggtcatgtctatgtgacccagggtagcgcaggctgcgactggctggaaaatggtgggcgtcagcatcaaccggccttcaaagttgatgtggtagataccacaggtgcgggtgatgtttttcacggcgctttggcggtggcgctggcaacaagtggggatttagcggagagtgtccgcttcgccagcggtgtagcggcgttaaaatgcacacgtcccggtggacgagccgggatccctgactgtgatcaaacccgatcttttttgagtctttttgtataaaatgccagggtgatggtttttcgaggaattttcatgagccttaccgaactaaccggtaacccgcggcacgaccaactcctcatgctgatcgccgagcgtgggtatatgaatattgatgagctggcaaatctgctggatgtctccacgcagacggtccgccgggatattcgtaaattaagcgagcaaggcctgattacgcgccatcacggtggcgcgggtcgggcttccagcgtcgttaatacggcgttcgagcagcgtgaggttagccaaaccgaggaaaaaaagcgattgccgaagcggtggcagactatattcctgatggtagtacaatatttatcaccattggtacgactgttgagcatgttgcccgggcgttacttaaccataatcatttgcggataatcaccaacagcctgcgtgtggcgcatattctttaccacaacccgcgctttgaagtgatggtgcccggcggtacgttgcgctctcataatagcgggatcattggccctagtgcggcgtcctttgtggctgattttcgtgctgattatctggtaacaagcgttggggcgattgagagcgatggcgcgttgatggagtttgatgtaaacgaagctaacgtggtgaaaacgatgatggcgcacgcgagaaatattctgctggtcgccgatcacactaagtatcatgctagcgcggcggttgaaattggtaacgtggcacaggtcactgcgctctttaccgacgagctgccgcccgctgcgctaaaaagtcgcttacaagacagccaaattgaaatcattcttccccaggaagacgcgtaaatttttgtgaccgttaacctggcttcataccttgccacatagccaaacccatcctttcccgctacagttaatttcttgtggcgcgaaaggaggcaaaaatgctctatatctttgatttaggtaatgtgattgtcgatatcgactttaaccgtgtgctgggagcctggagcgatttaacgcgtattccgctggcaagccttaagaagagttttcatatgggggaggcgtttcatcagcatgagcgtggggaaattagcgacgaagcgttcgcagaggcgctgtgtcatgagatggctctaccgctaagctacgagcagttctctcacggctggcaggcggtgtttgttgcgctgcgcccggaagtgatcgccatcatgcataaactgcgtgagcaggggcatcgcgtggtggtgctttccaataccaaccgcctgcataccaccttctggccggaagaatacccggaaattcgtgatgctgctgaccatatctatctgagccaagatctggggatgcgcaaacctgaagcacgaatttaccagcatgttttgcaggcggaaggttttagtcccagcgatacggtctttttcgacgataacgccgataatatagaaggagccaatcagctgggcattaccagtattctggtgaaagataaaaccaccatcccggactatttcgcgaaggtgttatgctaaaaaccattcaggacaaagccaggcaccgtacccgtccactatgggcctggctaaaactactctggcaacgcattgatgaggacaacatgacaaccctggcaggtaaccttgcctatgtgagcttgctcagtttagtgccgctggttgccgttgtttttgcgcttttcgccgcttttcccatgttttccgacgtcagcattcagttacgtcactttatttttgccaactttctgcctgctactggcgatgttattcagcggtatatcgaacaatttgttgccaattccaacaagatgaccgccgttggggcgtgcgggctgatcgtcaccgcgttattgttgatgtactccatcgatagcgcgttgaataccatctggcgcagtaaacgagcgcgaccaaaaatttacagcttcgccgtgtactggatgattttaacgctggggccgctgctggcaggggccagtctggcgatcagttcctatttgctctccctgcgctgggcgagcgatctcaatactgtcatcgacaacgtgctgcgtatttttccgttgctgttgagctggatctccttctggttgctgtacagcattgttcctaccatccgcgtacctaaccgcgacgcgattgtcggcgcgtttgtcgccgcactcctgttcgaagcaggaaagaaaggtttcgcgctttatatcaccatgttcccgagttatcagctcatttatggtgtgctggcggtgatccccattctctttgtttgggtctactggacatggtgtatcgtcttgcttggcgcggaaattactgtcactctcggggaataccgcaaactaaaacaagcagctgaacaagaagaagacgacgaaccatgattgcattaattcaacgcgtaacccgtgccagcgtcaccgtggagggagaagtgacgggcgaaattggcgcgggacttttggtgttattgggtgtcgaaaaggatgacgacgaacagaaagcaaaccgtctgtgcgagcgtgtgctcggctaccgcatctttagcgatgccgaaggcaagatgaatctcaacgtgcaacaggcgggcggcagtgtgctggtggtttcccagtttaccctcgccgcagataccgaacgggggatgcgcccaagtttctccaaaggtgcaagtccggatcgcgcagaggcgttatatgactatttcgtcgaacgctgccgtcagcaagagatgaacacgcaaacaggacgcttcgctgcggatatgcaggtaagcctggtcaatgatggccccgtgacattctggttgcaggtatgagccagcttccagggttgagtcgggaaacaagagagagtatcgctatgtatcaccttcgggttccacaaacagaagaagaattagagcgttactatcagtttcgctgggaaatgttgcgtaagcccctgcatcaaccaaaaggtagcgaacgcgacgcgtgggatgcgatggcgcatcaccagatggtcgtcgacgagcagggtaatctggtggcggtaggccgactgtatattaatgccgacaatgaagcgtccattcgctttatggccgttcatcccgacgtgcaggacaaagggttaggcacgctgatggcgatgaccctggagagcgtggcgcgtcaggaaggcgttaagcgcgtgacctgtagcgcccgtgaagacgcggtggagtttttcgccaagctggggtttgttaatcagggagaaatcaccacgccaaccaccacgccgattcgccattttttgatgattaagcccgtcgccactctggatgacattctgcatcgcggcgactggtgcgcgcagctgcaacaggcgtggtacgaacatatcccgcttagtgaaaaaatgggcgtgcgcattcagcaatataccgggcaaaaatttatcactaccatgccagaaaccggcaatcagaatccgcaccatacgctgtttgccgggagtttattcagtctggcgacgctcactggttggggacttatctggctgatgctgcgtgaacgccacctcggcggaacgattattcttgcggatgcgcatatccgctacagcaagccgattagcggtaaacctcatgcggtagccgacctcggtgccttaagcggcgatctcgaccgtctggcgcgcggacgaaaagcacgggtgcagatgcaggtcgaaatctttggcgacgagacgccgggtgcagtgtttgaaggcacgtatatcgttctgcccgcgaagccatttggcccgtatgaagagggcgggaacgaagaagagtaactgatggagaggggcggtgctgcctctctcattcaggtcatttatattagtccttggctatttcggttatattaaataagaactctataaatttttattcttcgttggctccatacgtgtcttgctacatcactgttcaggagcatttaaatattatttgtagaactgagtggcaattatcgcagataatgcttaattcatcatcttagttcatgtttgagcgatttttgatagtcaaaaccccctctggtgccatacttttctcataaatatttttaaaatctatagctaacaaatattatgcaaagataatggactagcatcattgtcagtatcattcatttactgctctgtatgttatgaataattatgttgtatgtttgctcttaaaccgtgggaaggaggctataatggttgccaatattaatctcattaaacaagaaagttattctgttgttaatttagaaaaacaactttcccgaactgttaccaacaaaattataacgatgagcaagtaaagaccggttggtggcagtactgaccggtctgtgatgaaagattaatttcaccttaaatcctggtgctgttaggatgctgacgtttttcggctacaccattcagattatgcaaataaatatctctgaatataatatattcatagcacccataattcatcctgggcgataactaaaccatttttgagtaataaatgaaacaactgcaacactcttattatttctggaaaacgcctcgcaaaaacaaaacaacatgcaaaaatccgctttttttaaatgattttccggcgtaattttcgcacatacattaatgagtaatatatgtaaggtattggtaatggcgatgaatacggtttttcttcatttaagtgaagaggcaattaaacggctgaacaagcttcggggctggcgtaaggttagtcgatctgcaattttacgcgaagcggtagagcaatatctggaacgtcagcaattcccggtgcgtaaagcaaagggaggcaggcaaaagggggaggtagttggtgttgatgatcagtgtaaggagcataaggaatgacaaaaatttttcattcttgaatataaaaaacagatgcccttattctggtattaatacaaggctgttttacttgaacttataataactgcaactgttacatcatatctggaaaacgcctcgcaaaaataaaaaatgatgcgtaaatgagctttctttaaagattcggcaagggtacttttctctccatagattcaaaaatgatattggcgagatatttatgaactctctggcaggtatagatatgggcagaattttactcgatttaagcaatgaggtgattaagcaacttgatgatctcgaggtgcagcgtaatcttcctcgtgcggacctattaagggaagcggtagatcaatacctgataaatcaaagccaaacagcaagaaccagtgttcctggcatctggcaagggtgtgaggaagatggtgtcgaatatcagcgtaagctgcgcgaggaatggtaatgggaaaaaatgatgtcaatcagattgctgacaacgtgcgcgttgttcatgccggatgcggcgtgaacgccttatccggcctacaaagtcgtataaattcaatgtattgcagtttattggtaggcctgataagcgcagcgcatcaggcaatcttacgcttgtcatcagtctcatgcccataaccttattgatgtggtggtgggtaaattgaggccaaaccggcactggcggcatagcttgaggtggtaacgcggaatacgagagatggtgtcgtcacaccctatgagctgtaatccgggcgacctgcgccacccggaaaacgtcagagattactctccttcacccggaaacaggaacgggttgatggaactgcgggcatagccttcttgctccattcgtgcgtccagtaccagagaggcgaggtcatctgctacggcttcgatttttggatctttttcctgatagagaattttcaggtaagtgtcgcagtcatcgcagctttcggctttaatcgcggcctgttcgtcatccaggctccagtaatgcagtttgccgctctgctcgcagttgctgcattttacgcgcactacgtgccattcagtttcacacaggttgcagtgcaggtaacgtagcccctgagtggtgccaatttgcaccatgctggacaccggcatagaaccacaaaccgggcaatattgacgttgctcgccgtattcagcgcgggctttgccggggatcagattggccatctgcgcccagtagaggctcagtgcagcccagataaacggcgctttatcgctgctgacggagctgaaatcagaggcaaacagcgcgctggccatatcttccagctcctgagtgcttgccttctccagattctcaatcactgccagcgccgggccgctcatttcaggtttcagctcagcaatcagcgccatcagcagcttttgccagtgcttatcacgcggcagaacgtgaatatccagcgggggcttgccttgtgcgctggcttctttaatgcgcgcagtcagatccatctccagcggatggtcgtacagcaccacttcctgggcgtgggcgataagcgcagcaaagcgcaggtaatcacccagaggattattttctgccagctcgcgcagacgctcggcgcggcggttgtataaattcttgagccgagggaacaataacggcggaatcatatccgccgtacgtttctcgctactacccagctcatcttgcgggattatgcgaatactcattcagctttcttttccgttgtcttgcggacctcacggtaccagcgcgggtgatgtttcttcgcccaggcgctggtaacccatccttccaccatggcggtaatcgtgcctttcacccaaagggcggcgtagatatgcaccatgataaccacaattaacgccactgcggcaaaactatgcagcattaacgcgaatcggatcaccgggatactgaaagcaggcgcaaaataaggacgccagataatcacgccgctcaccagcagcagaaccaggaaaataatcgccgcccagaaaacgcatttctgaccgaagttataacgcccggtgtcacctacttcctcgttgacgacgatcttacgaatattcttcgcccaaaagatatcatcccgattgattaggttgtgatgccagtaacggaaaaacatgatgatgaagctggcaaacataaccacgccgacaaacgggtgcagaattcgcgccagctgcggtgtgcccatgatttgcatcaaccagttgaaggacgggaacaaaaagcccagcccgctcaccgccgccaggatgaagcagaaggcggtgatccagtggttgatacgttccggcgcggtgtagcgcacgatggtgtcacgtcgtttcatttgcgctcctcgtctttctcttcgtgcagattattctcttcctcatccgcacggttcggaccgacacccacgtagtggaagatactggccgcaaaggtagccgcaaagccaacagccgcgagcggtttccagatgcctttccagaatttcacggtttcgctgatttccgggttctccggcaagccatgatacagatttggcttgtcagcatggtgcagcacgtacatgacgtgtgtaccaccgacgcctgccggatcgtacagacccgcattgtcgtaaccgcgggttttcagctcagcaacgcgctcgctcgccagcgttttcatgctctctttcgtaccgaagtgaatcgcgcccgttgggcaggtcttcacgcaggctggttcttgcccaaccaccacgcggtcaacgcacagcgtacatttgtagacgcggttgtcttccgggttgaggcgcggaatgtcgaacggacagcccgcaatgcaataaccgcagccaatgcactgctcggactggaagtcgacgataccgttggcatactgaataattgcaccttccgccgggcacgctttcaggcagcctggatcggaacagtgcatacagccgtctttgcggatcagccattccagtttgtcgttctgctccacttcgctgaagcgcattaccgtccagcttttggcgcttaaatcattggggttgtcgtacaccccaatgttattgccgacggtatcgcgaatgtcgttccactcactacacgccacctgacaggctttacagccgatacaggtggtaacgtcgatgagtttcgccacttcttcctggaagtcccgcgcctgaggcgcgggggtcagaccgttagtcgcggaacgacgaatgatatcttgagattgataagccatatgtcgtctccgttacaccttttccacattcacaaggaaggacttaaactccggcgtctgcgtgttcgcatcaccaacgaatggcgttaaagtattggcaataaagccttttttagctacgccttcatagccccagtgaatcggaataccgatggtatcgatatctttgccgttcgctttcagcgtgcgaatacgtttggtcaccaccgctttggctttgatatagccacggttggaggagactttcacggtatcgccctgggcaatgccaagtttattcgccaggctctccccgatttccacaaactgctctggctgcaaaatcgcgttcaacagcgcgtgtttggtccagtagtggaagtgctcggtcagacgataggtggttccgacatacgggaacttatcggctttacccaatgcttcggcgtcgtctttaaagatacgtgcagccgggttgctgataacgtttggatgcagcgggttagttcccagcggcgtttcaaacggctcgtagtgttccgggaacggaccttccgccatcttatcgagggcaaacagacgccccatgccttcctgctgcatgataaacggcccgacgccgctacccggaggcgctgcgctgtagtccggaatatcccagccggtccacttagtgccgtcccatttcagcaactgacgcttcggatcccacgggttaccctgcggatctgcggaggcgcggttatacagaatgcggcggttaagcggccatgcccatgcccagcccagcgtgttaccgaggccagacggatcggcgttatcacggcgtgccatctggttgccttccggcgtccagctaccggcgaaaatccagcagccacaggaggttgtaccgtcatcgcgcaattgggcgaagctactaagttgttggcctttcttgacgataaccgcaccggttgccggatcggtaatatcggccagcgccttaccgttgctctccatcgccacttcttcactagatggctcatgcggaatggcgtagttccatgtcatgttcagcacctggtccgggttcgcgccaccctgttcggcatacatcttgcgcaagcgcaggaagataccggagaggatctcgccgtcagtcagcgcaatccccggggcgtccgcacctttccagtgccactgtaaccagcgaccactgttaacgatagaaccgttctcttccgcgaagcaggtgcttggcagacggaacacttcggtctggatcttgctgctgtcaacttcgttcagctcaccgtggttctgccagaagttagaggtttcagtgttcagtgggtcgatggtgacgaggaacttcagtttgctcagacaaccgatcactttgtttttgttcgggaaactggcaacagggttaaagccctggcagatatagccattgaccttgccctctttcatcatctcgaagtattgcaggacgtcgtagcctttatcccacttcggcaaccagtcaaagccccagctattttccgccgtcgctttatcaccaaagaaggccttcatcatagagacgaagaatttcgggtagttgccccagtagtttacctggccttccagcagcggttttggcgtgttggcggtaaggtaggtttgcagatcggtctgcttctcgcttggcagcgtcatgtaacctggcaggctctggctcagcagccccaggtccgtcagcccctgaatattggagtgaccgcgcagggcgttaacgccgccgcctgccatccccatattgccgagcagcagctggatcatcgccatcgtacgaatgttttgcgcaccaacggagtgttgcgtccagccgagggcatacaggaagctggcagttttatcgtgagcactggtttctgcgatgtattcgcagactttcaggaacgcgtcttttggcgtaccacagatgttttcaaccacatctggcgtgtagcgggaaacgtgctgtttcagcaagttccacacgcagcgcggatgttgcagcgtggtatcgcgtttggcgaagccgttttcgtccagttcataagtccaggaggatttatcgtacttgcgtttttccgcgtcgtagccggtgaacaggccatcttcaaagccgtaatcctcacgcacgatcaggctggcgttggtataggcttcggtgtattcgcggttgaatttttcattgttcagcaggtacagcaatacgccactcaggaaagcaatgtcagtaccggaacgaataggggcatagtagtcagctaccgccgccgtacgcgtaaagcgaggatcgatcacaatcagcttcgcgccgttgtgaattttggcttccatcgcccagcggaacccgaccgggtgagcttcagcggcgttaccgcccatcaccacgacgaggttggcgttcttgatgtcgacccagtggttggtcatcgcaccgcgaccaaatgttggagcaagacttgctaccgttggtccgtgtcagacacgcgcctggttgtcgaccgcgagcatacccagcgcgcgggagaatttttgcgttaaatagccggtttcgttactgctcgcggaagcacacagcatcccggtggagagccagcggttaacagtcacgccttcggcgttttgcgcaatgtagttagcatcgcggtcttctttcatcagtttggcgatgcgatcaaacgcctcttcccaactgatttgctgccatttatcagaacctggcgcacggtattccggaaacttcagacggctttcggagtggatgaaatccaccaggccagcgcctttcggacaaagtgcaccgcggttgaccgggtgatccggatcgccttcgatatggaagatagatgctttggcgttttttgctccgtcaccgaggctgtacatcaacagcccacagcctacggaacaataggtgcaggtattacgggtttcgcgggtgcgcagcagtttatactgccgggtttccgcgagtgctacgctgggtgcaaaacccagtgccgctgccgtggtgcctgccataccgccagcgcagatcttaaagaactgccttctgctgacctgcatggattgctccttgtttcgacattgtcacgtcccatttacattcgcttgctgcgtgtgcagggagtgggagttatttttctttgcggaaggggccgcaaaggtccagaattggctcaatttccctccatccaggaagggtttgtaacagaataccataatgttggtgtgtgtgttcttatctggttaagagaaagtgaaaaaaacacagcgaaaagaaatcgaaaatgtgacaaatatcacaggtgttcgtcaaattgagttatggcggcgtgatgatttacaacacccacggttagatgaggtcgcggaagaagttcccgttgcgctggtctacaacggcattagccatgtggtgatgatggcgagccccaaagaccttgagtactttgcgctcggttttagcctttccgaggggattatcgaaagtccgcgcgatatcttcggcatggatgtcgttccttcctgtaatggtcttgaagtacaaattgagctttccagccgccgctttatggggttgaaggagcgccgccgggcgctggcgggacgtacgggctgtggcgtatgcggcgtggagcaacttaatgacatcggaaaaccggtgcagccgctaccgttcacccagacgtttgatctcaacaaactggatgatgcattacgtcatctcaacgattttcagccagtggggcaactgactggttgtactcacgccgctgcctggatgttgccatctggcgaactggtcggcgggcatgaagacgtgggtcgccatgtggcgctggacaaactgttaggccgccggagtcaagaaggggaaagctggcagcaaggtgcggtactggtttccagtcgtgccagttatgaaatggtgcaaaagagcgcgatgtgcggcgtagagattttgtttgcggtgtctgccgcgaccacgcttgctgtagaagtggctgagcgctgtaatctgacactggtaggtttttgtaaaccgggtcgggcaacggtttatacccatccgcagcgtttgagcaattaattaaaataagtcctgcgaaatatattaaattgcaggacttattcatttcgtgaattttattattttatttataaacaaaatgcgtgtagtggcgttttcttttttcatttattatgttcactctcttatctatatatttataaggcaattaaatgaaaaggaatttattatcttccgctattatagtcgccatcatgtccctcggtctgacgggttgtgatgataaaaaagccgaaacagaaacgctcccgcctgccaatagtcaacctgccgcaccagctcctgaagcgaaacctactgaagctcccgttgcaaaagcagaagctaaacctgaaacacctgcgcaaccggtggtcgatgaacaagcggttttcgacgaaaaaatggatgtctatatcaagtgctacaacaagttacagatcccggtacagcgcagtctggcgcgttatgctgactggctgaaagattttaaacaggggcctaccggtgaagagcgtactgtttatggcatctacggcattagtgaatccaacctcgctgagtgtgaaaaaggcgtaaaaagtgctgtggcgttaacgcctgcgctgcaaccaattgatggcgtggcggtgagttatatcgatgctgccgtggcgttgggtaataccattaacgaaatggataaatattacacccaggaaaattataaagacgatgcgtttgcgaaagggaaaacgctgcaccagacattcttaaaaaatctggaagcctttgaacctgtagccgaatcttatcatgcggcgattcaggaaattaatgataagcgtcagcttgcggaactgaaaaatattgaagaaagagaagggaaaacattccactactactctctggcagtcatgattagtgcgaaacaaattaataacctgataagccaagataagtttgatgcagaagcggcaatgaagaaagtgtctgaactggaaacgctagtggcgcaggccaaagaagcggataaaggcggcatgaatttcagctttattaatagcgcaggccagtatcaactcgaggctaaaaaatacgttcgccgcatcagagataaagtcccgtactctgactgggataaagagcaacttcaggacgcaaacagtagctggatggtcgaagactctttcccgagagcattacgcgagtacaacgaaatggttgatgactataatagcctgcgttaaacgtttttgatgataaatgcagtgtcggatgcggcgcatccgacacagttcaccccttgtgaagtaactccataaatgcctcatatcctgttaacccggcaataatctccgccggatgctgacacaatatgcttgccagatagctaaatatttttagctcatgacgcgcatcggcggcggcgcaggcgatcaagacatggttaatgacttcgttattcacctcaactggttgggcgagggtaataaaaaatccacgaaaacgtcgctcctgttcgctccagcaatgtgggatggcgaggcgattaacaatcaggttttcaccttcgccttcgcgggcgatgatgcgttgtgcttcatcggcggtaatatggtgttgtgcgactaattgcgcacaaatttgccgggtaatatgttgccagctttcaccgcgtacattgctataatgaaaacttccgggggcagagaaaaaacgctccggctgttggcgaataaatgccgtcgccagaaaatgttttatttgttcgataccggcagccgtaatgatattttttacggtgatgtaattatttaccgcgtcatccagtaaataatggctgttgttaatgatcaataacggctcaatctcttcgcgaatggcaacaagttcgcttaagctacgggcaataattacccgacaatttaaaacatcgcgctcaatggcgagctgattaatagtggcaatcgcgttctggtcgctgagcaaaatgatcggctggcgttcgttttgatgccgctccagcgcacaggcaaaatacaaaccgatcagatcgctgtcgaaaaggggaatatcgagctgttcacgcagtagcgtaataaagtgcagactcatatcaaaggccgcaggccaggcggctttcaggttattcatgctgctctggcggtgctcagcaatccacactggtgcggcaaggcaacgtaataaatgcccggtaatattctcaaccagctgcgcatcaataatattcaaactcgcgatgcccggcaccctttgcagcaacccctgcacattatcggcactaattacctgcgcttgctgatgctgtttctctatcaaacccgtcagggttcttacagcgttatcaccaagaaacagaccgctatgttcaacgatttgttttatctcgtcaccgggatattgcggccactcatcggtcagttgattacgcagggcgtaaatcgccagaatcaggctggagagataatcaccctgcatgagcggccagcggtgttggttgtcgcaggccgtggataaatgctgaaggttgtctcgtgttatgcccgccagcggaattaaaaacggatctttgcgcagcaagttcgccagcaagataacgcgtttctcttctgtctcatcaatgaaatggcccaaaccagggcggctggccaggcaacaagtgcgttcataacgctgttttaaccggggcagacgctctgctacccacgtttctggcaaattaagcgcgctggcgagttgcgcacggggagtgaaagtattcagtaataacagcgccagcagccgatcgtcgttatcgtgcttttgcagcaactgaaaaaagctgcggcgctcgaagatttccagctgatagcccgcactgccactggcgaaaatgcgggctttgccgttaagggtgaagttgagatagtcaatatcacgcaggatggtcctgccactaacgccagtctgttgcgccagctcgccaggcgtgcgcggctgttgctccagcagatcgacaatctttaactggcgttcgtttagcattaatccacctgacggaactggctaaacgcgttgactttctccgcagttaaggtcgtcagaaaaccccgtatcagcgtgagcagagcttcgtaatcggctttactaatcataccgctgttggcgtgcagataacgagttggcagacacagcgcgacaaccggacgcccgccgcccatcacgttgtagcgcccgccatccgtcgcaccggttttcatggtggaaaattgcagcggtaaatcgttatgtgcggcacagctttttaacgctgctaccagtttctggttggggaagtagcgcttgtcaaacagcatcagccccggcccctggcccagtttcagcgggtatttaatgttatcaatgcccggaacatcgcccgctacggcggtatccaacacgatcacgacgtccggtttaatgtgttccgcgctggtttgcgccccgcgtagcccaacttcttcttccacactgccaacgccatacagcgtaatttcgggattattcaccgtctgcaatagttcagccatcattgcgcagccgatgcggttatccaacgccttgccgaccactttatcttcgccccagcaggcaaaattggcttccgggctaataaaattaccaatttccacgccgcgcttttccacctcttcgcgactgttcgcgccaatatcaatgaacatctcatcaaaactcagcggttgttgcttttgcttttccgttaacgcatgaggcgcgacggaaccaatcacaccagggattttcactcccttgtgtgtgcgtatggttacccggtggttgagcatgctctgattccaccagccgccaatggtggtaaaacgcagaaaaccgctctcgtcgatgtgggtgaccataaagccgacttcatccatatgtccgacaacggcaacttttggacctttattccccttacgggcaacaaagctgcccagaccatcgaaggtgatttcattcacgcaaggttccagcgtgtttatcagaatgtcgcgaacttcctgttcatcgccgctgacggcgctggcttcgcacaactgttgcagtaactcaatgttcatggacaagctcctgttgcgcggctttcgctttgcggcgtaaccacaatcctttcaggacgataatgaaactaatgttcagcgcgaggccaatcgccagcaccagataaaagctacccaccgggctcatcaggccgatcagcgggtcaaagatacccaaaccaggtgccagacgtttgattccgaaagcgatcaccagcacgccggtaatgccgcccgccagcgtattggcggtaatcatcggcaacggagctgccagagcgtaaggaatagccggttcggttgcgactgtggcaccgaccacaatggcactactggcagcctctttttcctgtcgggtaaacagtttgggcgcaatgaacgtcgcaagacccgccgcgacgggcggcatcagcgcgacaacgccgacgatggcgtaccagtcataaatgtgtttttccagcagactgaagcagaagaaccaggcggttttattgatggggccgcccatatcgaacgccagcatcgcaccgaccagaaacgctgccgcaaacttcatacttggaggaatggtattcaggaagtggagcagcccgcccatgaggtcggacatcaccggcccgataacgtagtaagtgagcacgccgaaaaccagcagagtaacgaacgggatcagcatactaccgagcagcggttgtaatgctttgccaaggcgcactttgcggaaccagaagacgaaatagccaatcgccagccccagcaccaccgcgccgaggaatcccgcaccgctctgggtgccgagcagcgctttgtcgttcgccagatagcaaaccagaaacgccggagcgaaagccggtttatcggcaatgctgctggcaatataagcgcccatgatggggatcataaaggtgaagccaaggtaaccgatggattcaactacccaggtaaagctcggcgcgcctttgctcatatcggtatacggcaaaccgaactgcaccagcatgttggcaagcgccaccaggataccaccgccgatgacaaacggcagcgccgcagagacgcccgccatcaggtggctcatcacgctaccgctttgcacttcctgtttgccaagcttcacgccgctatctgcggcaaaaagctggctgtttgtcggtaattcgctgaaaatctggtcgatatttttcaacgcctgggagatggcaatctcataaactttcttcccggcaaaccgcgcgcgatcatcaccgctcaggccacgcccggtagcgagaatgacgtaatcggcagcggcaatctcttcgctggataagcggttttcaacgccactggacccttgagtttccacttttatggtatgaccgagagaacgggctttctgttccagggcttccgccaccatgtaggtgtgagcgatcccggcggggcagttggtgatcgcgacaatacgtaaggaactctccatcgccacttccttaactgctgagggtttgatttaacaaggcaagcacctggtcggtatcgccctgttgcagttgatgaataaattccttgtgaataattttgcgacacagtgtgccgatgattttgacctgatcctcttcgccgctttgcggcacgccgaggcagatccagcaattgacgtcttcgccatcgctggctttccagtcaatagcctgcgctttgcgggcgaataatacgaacggttgtttaacgcaggcgcttttaccgtgcggcacggcgacaccggaaccaaatccagtagagtgcattttttcgcgcagcagcagggtttgcaggaactggtgactgtcggtgataaaaccgttttgtaacgctattgtcgccaactgcttcagaacggaataagcgccattgccctgaatattcaggtcaatacagcttgcagtaagagctgccattaatcggactccataaaatatattttaatcaattgtaatggtggagcgattaagtgatgagaggcgatatgtcggtaaacaatgacaatttgagacagagtgaaaggtcagatttgcggagtaatgcacataatggttatttaaataaaccacatgaatcattaatgggttattcattatttttgtgatttactcacaatgtatcagggaaatataacttaccgggagatgtaatatgtttaatttttcaaatcgaaatttaaaatattgtgccggaggcatctctggcacattgggcaattacggcaggtaaaacacttcttgcagctcgctactcaccgggctgttatccgggttagcgggcataacatcggtcatatatttccaccaacgttggcagacatcagtgctggcaaccgcattccagcgttcttcagattcaatctctaccatggcaaacagcagattacgcgctttgtcgagatagatggcgtagttatgcgcaccgtgagatttcagcactgcttccagttctggccagatgggattatgccgacgctgatactcttcgtgggcgtcggggtttacctgcatgacaaaggctttgcggatcatgtttgctccttacagcgccagcgcactggcgagtggcgtaacgccgaaacgcttgccgagcgctatcaactcttcacggctgatggtctgtttcatgccgcccatgctataaaccttcactaatacttgtgcacttttttctgcggtgtcgattaaaccgaaggtttcatccagcgtcggtccgctgccgaagacgccgtggaagggccacaacaccaggctatgtttttgcatctcttgtgcggtcgcctggccgatttcgtccgtgccgggcaccatccacggcaaaatgccaacgccatccgggaataccaccagacactcggtgctgccttcccacagttggcgagtgaagaccgcggtgtcgttttcaagtacataggtgagggcgatcaggttggtggcgtggcagtgcatgatcacccgatctttgccgttggtggctttaatgcgctcgcagtgggaaaggaagtgagccggaagttcggaagtggggacggcttcgttggttaacccccaaagaatgtggtagcccgcgccgtcgctgtcgacttttacgatgcctaagttagccgcaggatcaagctggacgttacggaagaatttgccgctgccggtgacaataaacggtgtatttgccagtaaaggcatgggctggctgagcgggatatagcgcggttgttggtggaaattgtcgtgatatggtgcgatatcggcgtcatccaggcgtagcgtcaggttgccgccgttgcgctcatcccagcctttcagccaggcgtcggtggtggctttgatcattccctggacaaaccaggactgagtaatgttttgcatgttctgtgttcctgtaaattcggtgttgtcggatgcacgacccgtaggccggataaggcgctcgcgccgcatccggcaatcaatgcctgatgcgacgctgtcgcgtcttatcaggcctacaactattgccgacctgtaggcctgataaggcacttgtgccgcatccggcaatcaatgcctgatgcgacgctgtcgcgtcttatcaggcctacaactgttgccgacctgtaggccggataaggcacttgtgccgcatccggcaatcaatgcctgatgcgacgctgtcgcgtcttatcaggcctacaactattgccgacctgtaggccggataaggcacttgtgccgcatccggcaatcaatgcctgatgcgacgctgtcgcgtcttatcaggcctacaactgttgccgacccgtaggccggataaggcgctcgcgccgcatccggcagtgtttacccgcggcgactcaaaatttctttctcataagcccgcacgctctccagccattcgctacctgctggcgtatcgtgacgttggcaatacatttcccagaccgcctgccacggcaagcttttctgctcttccagcagtgccagacgcgcagtgtaatcgcccgccgcttccagcttgcgcagctcagcggtaggttccagcaacgcacgcagcagggcttttttcatattgcgtgtaccaatgacccacgcggcaatgcggttgatagaggcatcgaagaagtcaaggccgatatgcacccggtcaaacagatcgtgacgcacaatctcactggcaattgcctgggtttcatcatccagcagcactacgtgatcgctgtcccagcgaaccggacggctgacgtgcagcagcaactgcggcacatacagcatggcggcggaaatcttgtcggaaatcacttcagtcgggtggaagtgcccggcgtccaggcacagcgcagtctggcggctggtggcataccccatgtaaaactcattggagccaaccgtgtagctctctgcgccaatgccaaacaatttgctctcaacggcgtcgatatggtgcgcagggtttagcttctcgctgatcacctcatccagtgctgccagcagacgctgacgcggggcgagacggtcaacggtgatatctttcataccatccgggatccagatgttcatcacgcttggtgtgccgagttgctcgccaaaataggcgctaacgcgacggctggctttgcagtgatcaatccagaactggcgaatgctgtcgtcggcatgggaaagcgtaaagccatcggcgcttagcggatggctaaagcaggaggggttaaaatccagaccgagctgattggctttcgcccattcaacccagtttttgaagtgctctggtttgatctggtcgcggctgactggcgtatcactttccagatagatggcatgtaaattaagccgtttcggccccggaatcagccgcatagcctgttccagatcggcacgtagctcactggcattacgcgctttgcccggataattgcctgtggcctgaatccccccggtcaggctaccttccgggttttcaaaaccggaaacatcatcgccctgccagcagtgcatactaacgggtaaacgatcaagttggcgcagcgcctcctcgacatcaatccccaccgccgcgaaacgctgtttcgctagctcccaggcctgttccagttgagtggtcatgcgcaaagctcctttgtctgtcgtgtagagtgaatctgcgccacatagtgggcaatttcactgtcaggattaggggtaaaggtggtcagattcgcggtggtgctgacgacctgacggaaatcatccacattgttgagttcatccagcgtcattaactggatgccgatattgccgagcgtgctggcttcaacaggcccggcgatcacccgaataccgcaggcatcggcgcatagctggttgagcagcgtgttctggcagcctccgccgacaatatgcagttggctgaaatcttcaccgcgcagctgcgccagctcatgcaacacatcggcatacagcagcgccagactgtcgaaaatgcagcgcgccagttcagcatcactttccgggatcggttgcgccgtttcccgacacgcagcctgaatttcgctgcacatcgtctcaggattaataaagcgatcgtcattgggattgataatgaagcggcaagccggaagtgcctgtgtcgcggagataagcgccggaagatcgttgatttgctgctcctgaagcactcgctgaagcagccataagcccataatatttttcagcacccgatagcgaccttccgccccgccttcattggtgatgttggctgccagtgccgtgtcattggtaaatggcgtctggctttcgaagcccatcaaactccaggtgccagaagagagataagcagcacgactgccgtttaacgggctggcgataaccgcgctggcggtatcatggctggcaacggcgaccactggaatctcattaccctgcgggcaaatccagtgacctatgacattacccggatgcgtcgggcgaccaaaccaggctttgttggccccgctccacgccagtaggctctcgtcccagtcgtcgctattgatattgaccagttgcgtggtcgtggcgttggtatattcccagttcatcttgccggtcaggcgataactgaagtaatccggcatcagcagagcgtgagcaatgtgtggaataagttcaggttgttgctccgtcagcgcacgcaactgataaagcgtattgaagggcagaaactggatgccgctacgttgataaatatcgcgtttgccgagttgttgttgtgcctgcgccattaggccattggtgcggctatcgcgataagcaacgggcaggcccacacgctgaccctgttggtcgagcagcacaaagtccacgccccaggtatcaatcccaatgctatcgatacgaatcccttcctcgcacaccttgtttaatccaaggcgaatggcactttcaaggctatccacatcccaggtgacatagccgttctgactatgcagcccattgttaaaacgatggatttcgcgcagcgtcaggctgcggcattcacgctcgtaacgcgccagcatcacgcgcccactggatgcgccgagatcgacggcgacacaattgcgaaaggtcataatgtgatcctgctgaatttcattacgaccagtctaaaaagcgcctgaattcgcgaccttctcgttactgacaggaaaatgggccattggcaaccagggaaagatgaacgtgatgatgttcacaatttgctgaattgtggtgatgtgatgctcaccgcatttcctgaaaattcacgctgtatcttgaaaaatcgacgttttttacgtggttttccgtcgaaaatttaaggtaagaacctgacctcgtgattactatttcgccgtgttgacgacatcaggaggccagtatgaccgtattacatagtgtggatttttttccgtctggtaacgcgtccgtggcgatagaaccccggctcccgcaggcggattttcctgaacatcatcatgattttcatgaaattgtgattgtcgaacatggcacgggtattcatgtgtttaatgggcagccctataccatcaccggtggcacggtctgtttcgtacgcgatcatgatcggcatctgtatgaacataccgataatctgtgtctgaccaatgtgctgtatcgcagcccggatcgatttcagtttctcgccgggctgaatcagttgctgccacaagagctggatgggcagtatccgtctcactggcgcgttaaccacagcgtattgcagcaggtgcgacagctggttgcacagatggaacagcaggaaggggaaaatgatttacccagcaccgccagtcgcgagatcttgtttatgcaattactgctcttgctgcgtaaaagcagtttgcaggagaacctggaaaacagcgcaagtcgtctcaacttgcttctggcctggctggaggaccattttgccgatgaggtgaattgggatgccgtggcggatcaattttctcttagtctgcgtacgctacatcggcagcttaagcagcaaacgggactgacgcctcagcgatacctgaaccgcctgcgactgatgaaagcccgacatctgctacgccacagcgaggccagcgttactgacatcgcctatcgctgtggattcagcgacagtaaccactttagcacgctttttcgccgagagtttaactggagtccgcgtgatattcgccagggacgggatggctttctgcaataacgcgaatcttctcaacgtatttgtacgccatattgcgaataatcaacttcgttctctggccgaggtagccacggtggcgcatcagttaaaacttctcaaagatgatttttttgccagcgaccagcaggcagtcgctgtggctgaccgttatccgcaagatgtctttgctgaacatacacatgatttttgtgagctggtgattgtctggcgcggtaatggcctgcatgtactcaacgatcgcccttatcgcattacccgtggcgatctcttttacattcatgctgacgataaacactcctacgcttccgttaacgatctggttttgcagaatattatttattgcccggagcgtctgaagctgaatcttgactggcagggggcgattccgggatttaacgccagcgcagggcaaccacactggcgcttaggtagcatggggatggcgcaggcgcggcaggttatcggtcagcttgagcatgaaagtagtcagcatgtgccgtttgctaacgaaatggctgagttgctgttcgggcagttggtgatgttgctgaatcgccatcgttacaccagtgatagcttgccgccaacatccagcgaaacgttgctggataagctgattacccggctggcggctagcctgaaaagtccctttgcgctggataaattttgtgatgaggcaagctgcagtgagcgcgttttgcgtcagcaatttcgccagcagactggaatgaccatcaatcaatatctgcgacaggtcagagtgtgtcatgcgcaatatcttctccagcatagccgcctgttaatcagtgatattagcaccgaatgtggctttgaagatagtaactattttagcgtggtgtttacccgggaaaccgggatgacgcccagccagtggcgtcatctcaatagccagaaagattaattcgccatgccgatgccgacgatgttagcggcgacaataatcaccacacaaccgaggctcaacaccgttaccggacggcgtcctgcattgttccactctttcagcaccagcccgacgataccgccgcacaatacatagaaactcatatgcagcatccaactgatgtagtcatactgcgccggaatgcgggcgtggccccaggcatagaaaaagaattgcagataccacatcaacccgcccagtgtgctgagtaacacattgtgaatgatcaggctttttgccaggctgaagtcggcttttaggctcaaatccttcacttttgccagacgaataaaacagaaaccgaggttaatgatcgcgccgccgcccatgatgacaacatagcttggcagagcgacatacagtggatcgacgccaagtgcggcagcggcttcatgcatcggttttgcggcgttcatcgcaaaggacatcccggcagagaaaatgccgcacatcaccgccagcaccagcccttttttcagattgaactcttcggctttaatgcccatcttgcgctctttcaactgcccggcgcgagttacaatccctacgccaatcagcgccaccagaacgccgagcaacgtcatgcgtccgccttcggtgctaatcaacacatcgaaattgccgttgataattggcgtcatcagcgtaccgacaatcaacgtaatgccaatggcgatgccaattcccatgctcatgccgagataacgcatggtcaggccgtagttgatattaccgatcccccacatagcgccgaacagaaaaacaggcagtcgcgtagagagactaaagctgctgtaatacgcccagaaattcggtagtaacagggcgctgatggcccacggcagaataatccagctaacaatcccaccgacactccacatggtttcccaactccatttttttacttttttgaacggagcgtaaaaacaggctgcactggccgcgccgatcaaatgccaaaatatccccatcgtaatcgcgttactcatcttcttatcctcatcatttttcgtcgcgtcacatctccgacgagatgagtgtaaaaatcgtgctgtcgattaacctttcgcctgttgccgccgttgtcgatttactggcaatcacggcattaagtgggtgatttgcttcacatctcgggcattttcctgcaaaaccatacccttacgaaaagtacggcattgataatcattttcaatatcatttaattaactataatgaaccaactgcttacgcggcattaacaatcggccgcccgacaatactggagatgaatatgagctataccctgccatccctgccgtatgcttacgatgccctggaaccgcacttcgataagcagaccatggaaatccaccacaccaaacaccatcagacctacgtaaacaacgccaacgcggcgctggaaagcctgccagaatttgccaacctgccggttgaagagctgatcaccaaactggaccagctgccagcagacaagaaaaccgtactgcgcaacaacgctggcggtcacgctaaccacagcctgttctggaaaggtctgaaaaaaggcaccaccctgcagggtgacctgaaagcggctatcgaacgtgacttcggctccgttgataacttcaaagcagaatttgaaaaagcggcagcttcccgctttggttccggctgggcatggctggtgctgaaaggcgataaactggcggtggtttctactgctaaccaggattctccgctgatgggtgaagctatttctggcgcttccggcttcccgattatgggcctggatgtgtgggaacatgcttactacctgaaattccagaaccgccgtccggactacattaaagagttctggaacgtggtgaactgggacgaagcagcggcacgttttgcggcgaaaaaataatcatttgccgcctgctgcaatgaggcgtataggccgcatatcagcttaaaaaatgaaccatcgccaacggcggtggtttttttgtgatcaatttcaaaataaaaacaatgatccgataaaaataaaacagcgtttcaattgatgtggttttgatcacttttattgattaaatgaatgtctatcttcgtttccatcaacactgatgctccattgaggaattacgcatcagcccttaaaaatatgccgacaggtgatggaaatgcagataaaacgcagcattgagaaaatcccggggggggatgatgctcgtcccgctattccttggcgcactgtgccacaccttcagcccgggggcggggaaatattttggaagtttcaccaacgggatgattaccggtacggtgcccattctggcggtgtggtttttttgcatgggggcgagtataaaattaagcgcgacgggaacggtactgcgtaaatccggtacgctggtggtaactaaaattgccgtcgcgtgggtggttgcggcaattgccagccgtattattccggaacatggtgttgaagttggattctttgccggacttagtacgctggcgctggtggcggcgatggatatgaccaatggcggactttacgcttccatcatgcagcagtacggcacaaaagaagaagctggggcatttgtgttgatgagcttggagtccgggccgctcatgacgatgattattctgggcactgccgggattgccagctttgaaccgcatgttttcgtcggcgcagtattaccgttcctggtgggctttgccctggggaaccttgaccctgaattgcgagaatttttcagcaaagcggtgcaaacgctgattccattctttgccttcgcgctgggcaataccattgatttgactgtgattgcccagactggtttgctggggatcctgttgggtgtggcagtaattatcgtgaccggtattccgttgattatcgccgataaattgattggcggtggcgatggcactgccggaattgccgcttccagttccgcaggggccgcggtagcgacacctgtgctgattgcagaaatggtgcctgcgtttaaaccgatggctccggcagcaactagcctggtagcgacggcggtcattgtgactagcattctggtgccaattcttacctctatctggagtcgtaaagtcaaagccagagcagcgaaaatcgaaattttaggtacggtgaaataaacctgcttccttaatccccacagccggatgaactaacgttcgtccggtttgctattgagttcctgcctggatacttaccgcgaaaacagcacgcctgacataaaataaatatggtctaatggggaaatttctcgtggagagggaacagatgcgatatccggttgatgtatacacaggcaagattcaggcttatcccgaaggcaaacccagcgcaattgctaaaatccaggttgatggtgagttgatgctgacggagctggggctggaaggtgacgagcaggcggagaaaaaggttcacggcgggccagacagagcgctgtgtcattatcctcgtgagcattatctctactgggcgcgggaatttccggaacaggcggagttgtttgttgcgcctgcgtttggtgaaaacctcagtaccgacggcctgacggaaagtaatgtttatatgggcgatattttccgctggggagaggcattaattcaggtcagccagccgcgcagcccttgctataaactcaattaccattttgatatcagcgatatagcgcagttgatgcaaaacacaggtaaggtggggtggttgtatagcgtgatagcgccagggaaagtgtctgcggacgcgccgctggagttggtttcccgtgtcagcgatgtgaccgtgcaggaggctgccgccatcgcatggcatatgccgtttgatgacgatcaatatcaccgtttactctccgctgccgggttaagcaaaagctggacgcggacgatgcaaaagcgccgactgagcggcaagatcgaagatttttcccgccggttgtggggaaaataacccccggagtgtaggcctgataagacgctatcagcgtcgcatcaggcatcctgctcaaatgccggatgcggcgtaaacgccttatcctgcctgcaaatgcgaagtttaactccgcttatacagcggcaaccaaatcaccagccgtaaaccgcccagcgggctgtcttctgccttcacccagccacgatgctgctgaatggcggtttcaacaatcgccagccccaaacctgtaccgccagattcacgatcgcgtgcttcatcggtacgatagaacggacggaaaatctgttcgcgatcttccgggctaacgccaggaccatcgtcgtccaccgtaatggtgataccgtctttatctaccgcaaagcccacttcaatcttcgtatgggaataacgcagagcattacgaacaatgttttccagcgcactttccagggcgttcggattgccgtacagcggccacggcccaggcgggaagttaactgtcaagctcttgcccatttgctcggcttcgaacgccgcgttatccagcacttcactccacaactggttggctttgatggtttcgctaaccagcgcgtttttttgctgattacgactcatcaccaacagatcgttgatcatgctgtccagacgttgcgcttcggtttcaatacgctccagttccttgctttcaccgctacgacggcgcagtaacgccgtacccagttgcagacgcgtcagcggggtgcgcagctcgtgagagatatcagaaagcagacgctgctgagaggtcatcatgcgctccagcgcggtgaccatctggttaaaactggcacctgcggcaaggaattcctgtggccccgcttccagttccgggtgctggcgtaagtttccctgggcaacttcatcggcagcgtttttcagcttacgcgccggttttgccagactccaggccaaccacaacagcagcggcgtactgaccaacatggtgacaatcagcagtaatagcgggcggtcaaacagtaagttaatgaaatcggattgagaactgctggccggacgaatcagataaagttggtaattatcttcgccatcacgcacggagaacggaccgaccagttccacgcggccatactttttcttctgcggatgatcggcgttatcggcctgaccaataaagttacgaatgatctgcatttcgctgcgttcagcgccgatcacgcggccttcggtggtcaccaataacaaacgctgtcctggcggtgcccacttatcaatcgcccggaacagacgccgccaccacattaaatcgttgggcggatcgttcgccagctccgcttcgacatgctgctcaatcatcagcccctgacgctgttcgctatccagaagctcggtcatctggcgactatcgagcttgggtaacatcaaaaccaacatcaacaccagcgccagcgtcagccagaagatggcgaagatgcgcgcggttaagctgcctatcatgaagcagaaaccatcagatattagctcaactagcagaaaccatcagatagccgcgaccacgcaaggttttaaaccacgggtgaccatctttacgatccggcagtttacgacgcaggttggaaatgtgcatatcaatagcgcggtcgaaaggcgtcaggcgtttgcccaacacttcctggcttaaatgttcacgggaaaccacctgacccagatgctgtgccagcaaatagagcagggtaaactcagtaccggttaactccagcgtttgcccgtcgaagctggcttcctgacggcctggattcagcactaaggcatcaacttccagtgtcggactaccgttgtcgttgttttgctgttgctcgctccagtggctacggcgcaggatcgcgcgaatacgtgccaccagctcacgatcattaaacggtttcgggagatagtcatctgcgcccagctcaaggccgagaacgcgatcaagttcactgccgcgcgccgtcaacataatgacaggcgtctggtgtgtctggcgaagtgcttttaatgtgtcgataccatttttcttcggcatcattacgtcaagcaaaagtaaatcaatgctgtcgtccagaagatcaagcgcctgttccccatcgtgggcaacaatcacgttgaagccttccatctcgagcagctcctttaatagggaagtcagctctcggtcatcatcaactaacaggattttattcattgtttaaatacctccgaggcagaaattacgtcatcagacgtcgctaatccatgactttacgttgttttacaccccctgacgcatgtttgcagcctgaatcgtaaactctctatcgttgaatcgcgacagaaagattttgggagcaaatgatgcgcatagttaccgctgccgtcatggccagtacgctggcagtcagtagtttaagccacgctgctgaagtcggtagtggcgataactggcatccgggtgaagaacttacgcagcgcagtacgcagagccatatgttcgacggcataagtttaaccgaacatcagcgtcagcagatgcgagatcttatgcaacaggcccggcacgaacagcctcctgttaatgttagcgaactggagacaatgcatcgccttgtcaccgcagaaaattttgatgaaaacgctgtgcgcgcacaggcagaaaaaatggcgaatgagcaaattgctcgtcaggttgagatggcaaaagtccgcaaccaaatgtatcgcctgttaacgccggagcagcaagcggttttaaacgagaaacatcaacaacgaatggagcagttgcgtgacgtgacgcaatggcaaaaaagtagtagcttgaagctattgagtagtagcaacagtcgttcccagtaataaaccctgttttccttgccatagacaccatccctgtcttcccccacatgctgtgggggttttttttatcctcaatttgcctgctgcttaatgcattgcagatgatttgcttccgttatactagcgtcagttgatagcgggagtatttatgaatcaatcttatggacggctggtcagtcgggcggcgattgctgcgacggcgatggctagcctgctattgctgattaaaatttttgcatggtggtataccgggagcgtgagtattctcgccgcgctggtggatagcctggtggatatcggcgcgagcttgacgaatttattggtggtgcgatattccctgcaacctgccgacgataatcacagctttggtcacggtaaagctgagtccctcgcggcgctggcgcaaagtatgtttatctccggtagcgcactattcctgtttttgacgggtattcaacatctgatatctccaacaccgatgacagatccaggcgtcggggttatcgtgacaattgtggcgctaatttgtacgattatccttgtcagctttcagcgttgggtggtgcggcggacgcaaagccaggcggtgcgggctgatatgctacattaccagtctgatgttatgatgaacggcgcaattctgctggcgctggggttgtcctggtacggctggcatcgcgccgatgctctgtttgcattgggaatcggcatctatattttatatagcgcgttacgcatgggatatgaggcggtacagagtttactggatcgcgcattgcctgatgaggaacggcaagaaattattgatatcgtgacttcctggccgggtgttagcggcgctcacgatcttcgcacgcggcagagtgggccgacccgctttattcagattcatttggaaatggaagactctctgcctttggttcaggcacatatggtggcggatcaggtagagcaggctattttacggcgttttccgggaagcgatgtaattatccatcaggacccctgttccgtcgtacccagggagggtaaacggtctatgcttagttaatcagtataaaagagagccagacccgcattttgtgtataaaataccgccatttggcctgacctgaatcaattcagcaggaagtgattgttatactatttgcacattcgttggatcacttcgatgtgcaagaagacttccggcaacagatttcattttgcattccaaagttcagaggtagtcatgattaagaaaatcggtgtgttgacaagcggcggtgatgcgccaggcatgaacgccgcaattcgcggggttgttcgttctgcgctgacagaaggtctggaagtaatgggtatttatgacggctatctgggtctgtatgaagaccgtatggtacagctagaccgttacagcgtgtctgacatgatcaaccgtggcggtacgttcctcggttctgcgcgtttcccggaattccgcgacgagaacatccgcgccgtggctatcgaaaacctgaaaaaacgtggtatcgacgcgctggtggttatcggcggtgacggttcctacatgggtgcaatgcgtctgaccgaaatgggcttcccgtgcatcggtctgccgggcactatcgacaacgacatcaaaggcactgactacactatcggtttcttcactgcgctgagcaccgttgtagaagcgatcgaccgtctgcgtgacacctcttcttctcaccagcgtatttccgtggtggaagtgatgggccgttattgtggagatctgacgttggctgcggccattgccggtggctgtgaattcgttgtggttccggaagttgaattcagccgtgaagacctggtaaacgaaatcaaagcgggtatcgcgaaaggtaaaaaacacgcgatcgtggcgattaccgaacatatgtgtgatgttgacgaactggcgcatttcatcgagaaagaaaccggtcgtgaaacccgcgcaactgtgctgggccacatccagcgcggtggttctccggtgccttacgaccgtattctggcttcccgtatgggcgcttacgctatcgatctgctgctggcaggttacggcggtcgttgtgtaggtatccagaacgaacagctggttcaccacgacatcatcgacgctatcgaaaacatgaagcgtccgttcaaaggtgactggctggactgcgcgaaaaaactgtattaatgatttcggaaaaaggcagattcctttaccctgaaaccgatgacagaagcaaaaatgcctgatgcgcttcgcttatcaggcctacatgaattctgcaatttattgaatttgcaaacttttgtaggccggataaggcgttcgcgccgcatccggcatggacaaagcgcactttgtcagcaatatgaggcggatttcttccgcctttttaatccctcaacatatacccgcaagttatagccaatctttttttattctttaatgtttggttaaccttctggcacgctttgctcatcacaacacaacataagagagtcgggcgatgaacaagtggggcgtagggttaacatttttgctggcggcaaccagcgttatggcaaaggatattcagcttcttaacgttagttatgatccaacgcgcgaattgtacgaacagtacaacaaggcattcagcgcccactggaaacagcaaactggtgataacgtggtgattcgtcagagtcacggtggcagtggtaaacaagcgacgagcgtaatcaacggtattgaagctgatgttgtcacgctggctctggcctatgacgtggacgcaattgcggaacgcgggcggattgataaagagtggatcaaacgtctgccggataactccgcaccgtacacttccaccattgttttcctggtacgtaagggaaatccgaagcagatccatgactggaacgatctgattaaaccgggtgttagcgtgatcacgcctaatccgaaaagctctggtggcgcgcgctggaactacctggcagcctggggctacgcgctgcatcacaacaacaacgatcaggcaaaagcacaggattttgttcgggcactgtataaaaacgtcgaagttctggattctggcgcgcgtggctccactaacacttttgtcgagcgcggaattggcgatgtactgattgcctgggaaaacgaagctctgctggcagcgaatgaactggggaaagataaattcgaaatcgtcacgccgagtgagtctatcctcgcagagccaaccgtgagcgtggtcgataaagtggtcgagaaaaaaggtactaaagaggtggcggaagcctacctgaaatatctctacagcccagaaggtcaggaaattgccgcgaaaaactactaccgtccgcgcgacgctgaggtggcgaaaaagtacgaaaatgcgtttccaaagctgaagttattcaccattgatgaagagttcggcggctggacgaaagcgcaaaaagagcattttgctaacggcggtacgttcgatcagatcagcaaacgctgatttccccaggataattatcaaacccggtggtttctcgcgaccgggttttttatttgtcacgattttgcgttacccttgcatctctttgaggtacagggaaaaaaagatgaaaaaagcgggtcttctttttttggtgatgatagttatcgccgttgtggctgccggtattggttactggaaattaaccggtgaagagagcgatacattacgtaagattgtccttgaggaatgtttgcccaatcagcagcaaaatcaaaatcctagcccatgtgcggaagtcaaacccaatgccggatacgtggttttaaaagatcttaatggcccactgcaatatctgttgatgccaacgtatcgtattaacggtactgaaagtcctttgttgaccgatcctagtacgccgaacttcttttggttggcttggcaggcgcgtgattttatgagcaaaaaatacggccagccggttcccgatcgcgcggtttctttggcgatcaactcccgcaccgggcgtacgcaaaaccattttcatattcatatctcttgtattcgtcctgatgtgcgcaaacagctggataacaatctggcgaacatcagcagccgctggttgccactgccaggtggtttgcgcgggcatgaatacctggcgcgtcgggtaacggaaagcgaactggtacaacgcagcccatttatgatgctggcagaagaagtacctgaggcgcgggaacatatgggacgctacgggctggcgatggtacggcagagtgataacagttttgtattgctggcgacacaacgaaatctactgacgcttaaccgtgctagtgccgaggaaattcaggatcatcagtgtgagattttgcgttaaggcgaagagttaaggaaagtaagtgccggatatgaaatccggcacctgtcagacttaagcctgtttagccgcttctgcagctttaacgattactgcgaaggcgtcagctttcagagaagcaccaccaaccagcgcgccgtcgatatccggctgagcaaacagttctgcagcgttagacgcgtttacagagccgccgtactgaatgatcacttgttcagcgatgttagcgtcaactttagcgatgtggtcacggatgaatttgtgaacagcctgtgcctgagccggagttgcagatttgccagtaccgattgcccatacaggttcgtaagcgataaccgcaccttcgaatgccgcagcaccctgagttttcagtaccgcgtcgatctgacgtgcgcaaacttcttcagttttgcccgcttcattttcagcttcggtttcaccgatgcacagaaccggagtcaggccctgctctttcagcaccgcgaattttttcgcgatcagttcgtcagattctttgtggtaagtacgacgttcagagtgaccgatgatgatgtactgtgcgccgatgtctttcagcatagcagcagaggtttcaccggtgaatgcgccggacaggttcaggtccacgttttgcgcacccagcatgatgtggctgccttcagcttcgcgcttcgccatatcgatatacatttccggtggtgcgattgcaaccgcacagccagcaacacctgccagctctttacgcaggttagaaaccagctcgtgaaccatgtggcggctgccgttcagtttccagttacccatcactaaaggatgtcgcattttaattctccacgcttataagcgaataaaggaagatggccgccccgcagggcagcaggtctgtgaaacagtatagagattcatcggcacaaaggctttgctttttgtcatttattcaaaccttcaaggctttcagatagcgccagcttaatcggttcaacagcgaaggtcagccccttttcgccgttgtccgcgacaacataacgcagtgcaccttctgtctcggtgtaataacgtttgtttttccccgccgttagtaggctctgcagttttttctggctttgtgttttggtcattaatggggtgagtgtgcggatcaccgctgccatgtattcctgagctttcgctttcgcggctttttgctctggcccctggatgggtagccaggtcatttgaatgcttttgatttttaaggtaccgcgctccagcgctgtagaagcatacaagttctcattaattttacttgcagcacgagtgagattggctttgtcgggactgctgtcgatggcacgaaattcgttcagtggcaggctgggattctggctgttaaagtcttctcgaaactggctgatggagagatcgaaagtaggggctccagccagcagataaggcgcggtcgttgccgtatctggtgtttgtgcatgcgcctctgttgtaacggttaatgcagaacataagagaaaaaacagcgtacaccctggcttcattgacagtaccttttgttatgactggctccgattaaaacgatatctgtcgcccttgtcaaaagggtagaatcctggaaaagacaaccatcaaggaacttacatgaccatacagcaatggttattcagttttaaagggcgtattggacgccgtgatttctggatttggataggcctgtggttcgcaggcatgctggtgcttttcagtctggcgggtaagaatctactcgatattcagaccgcggcgttttgccttgtgtgcttgctctggccaacagcggcagtaactgttaagcgcttgcatgatcgcgggcgttccggcgcatgggcatttctgatgattgtggcgtggatgctgctggcgggtaactgggcgattttaccgggtgtctggcaatgggcggtggggcgttttgtcccgacgttgattctggtgatgatgcttatcgatcttggtgcgtttgttggcacacaaggcgaaaataaatatggtaaagatactcaggatgtgaagtataaagccgacaataaaagtagtaattaacctttaatatatctcttactgctatttttttccgggattgttatttccacgatgcaaatgacaatacccggaaaatccttctgaactcttcaccttaagcaatatcaaaaaaaatggtaatccataagatcattacttgtttgttcttcccttaacggcgcattattcttaagtcgtaatcgacagagaggcgaatatacagaggtgccctatgaaagatgtcgtagataaatgcagtactaaaggatgtgcgattgatatcggtacggtgattgataacgacaactgtaccagtaagtttagccgcttttttgccacccgcgaagaagcagagtcttttatgaccaaactgaaagagcttgccgccgctacatcctctgcagatgaaggggccagcgtggcctataagattaaggatctggaggggcaagttgagcttgatgcggccttcactttcagttgccaggccgagatgattatttttgagttaagtctgcgtagcttagcttgatggagttgctttagaaggagttaaacatggcttataaacacattggcgtggcaatttccgggaatgaagaagatgccttactggtgaataaagccctggagctcgccagacataatgacgctcacctgacgttaattcatattgatgatggcttaagcgagttgtatccgggtatctacttccctgcaacagaagatattcttcaattgttgaagaataagagcgataacaagctgtataaactgacgaaaaatattcaatggccgaagacaaaactgcgtattgaacgcggagaaatgccggaaacactgctggaaattatgcaaaaagagcagtgcgacctccttgtctgtggtcatcatcacagttttatcaaccgtttgatgccggcatatcgcgggatgatcaataagatgagtgcggatttgctcatcgtgccgtttatcgataagtaaccgcttaccagtaatgctccgctgtcatatggcccggtcggcgacgtaaatgtttcgtcatctgccgggtctctttcagcaactgttgtgtatcgcgcaccatctgtggattgccgcacagcatcacatggctggtttctttattcatcggcaggccaatcgtgctttccagttccccactttcaattaatgccggtatccgtccggtgaggctccccgctgccgtttcccgactgaccaccgtctgaatgcgcagttttccttcgtagcgtttttccagttcctgcatcagtggcaaatagcttaagtcggcggcataacgtgcggcgtgcaccaggaccagatttttgaagcgatctaaatctttacctagttgcagaatgcttaaataagggccaatcgctgtaccggttgccagcatccatagcgtttcgcagtgcggcacttcatcgagcacaaagaatcctgccgcttcgctaaccacctgcacttcatcgcctggtttcagtgccgccagtcgtgggcttaatttgccatcggggacggtgaccaggtaaaactccagatcgggattatcggggctgtttacataggagtaggcgcgctggacgcgttcgccgtcgatttcaaggccaagcttggtaaattgcccggcggtaaacggaagcacgggggcgtgaacggtgagactaaacagggcgtcggtccagttctgcactttagtgactttgcctgttacccaatcagccatgtttttctcctgttttgattgacttgccttatcttcgttctccgaacaaaaaaattccagtcccgaaggactggaaggctcaatcgatcaaatcaatcagaggatgtgcacctgcatttccgggtctttgcgatccagatagtggatggactgaatgcggcgaatggtgcgactcttgccgcggatcagcagcgtttcggtagtcgcgatattgcctttgcggctaatgccttccagcagatcgcctttggtaataccggtggcagagaagatgacgttatcgctgcgcgccatatcgcccaggcgcaatactttaccggcttcgatgcccatcgctttgcagcgtgccagctcctgctcgccaatgcgacgattctcttcgttgtcgcctttgacgtcatgacgcgccagcagacgaccgttcatgtcgccatctaatgcgcggatcaccgccgcagaaactacgccttccggcgcgccaccaataccgtacagcacgtcaacttcgctgtctggcatacaggtgagaatactggccgcaacgtcgccgtccggaatagcaaatacgcgtacgccgagttgctgcatttcagcgataacggcatcgtggcgtggtttagccagaatcgttaccgtcagttcgctcaacggtttgccgagcgccgccgctacattgcgcaggttatccgccagcggcaggttcagatcaatggtgcctttggctcccggcccgacaatcagcttctccatatacatatccggcgcattgaggaagcagcctttatcgcctactgccagcaccgccagcgcgttagcctggcccatcgccgtcatgcgcgtgccttcaatcggatcaacagcaatatctaccgcgtcgccgcgaccagtaccgactttttcaccaatgtagagcatcggtgcttcgtcgatttcaccttcaccaatgacgatggtgccgtcaatgttgacctggttgagcataatacgcatggcgtttaccgccgcgccgtccgcggtgtttttatcgccgcgtcctaaccatttgtagccagccagcgccgcactttcggtgacgcgggaaaattcgatggcaagttctcgtctcatagcaaactctaagcagtaaggaatggcgcgaagtgtagcacaggggaagggagggattattgatgtgtgcggggttgcccccgcacgtttcgggactaccggatgcggcataaacgcttcattcggcatttacattattcgtcgtgttcttcccacgccatcgcgcgtttaaccgcttttttccagcctgcgtaacggtaattacgctcagtggtttcgatgcctggacggaactcgcgctcaatcaccgctttctcttgcagctcgtcgaggttctgccagaagccaaccgccaggcctgcgagataggccgcacccaatgcggtgacttcgcgcacttccgggcgctcaacgcgggtgccgagaatatcggactggaactgcatcaggaaattgtttgctactgcgccaccatccacgcgcagggcgtgcagacggataccagagtcggcctgcatcgcttccagcacgtcacgcgtctgataagcaatagactccagcgtcgcgcgtataatgtggttagcgttcaccccacgagtcagaccgaaaatcgccccgcgcgcatacgggtcccagtacggcgcacccagcccggtaaatgccggaaccacatacacaccattggtgttttgcactttggtggcgaaatattcggaatcgtaggcgtcgttaatcaacttcatttcatcgcgcagccactgaatggatgcgcctgccataaacaccgcaccttccaacgcatagttcacttcgccagtcgggccgcaggcgatggtggtcagcaggccgttttcacttttcaccgctttctcgccagtgttcatcagcataaagcagccagtgccataggtgttcttcgccatcccttctttcacgcacaactgaccaaacagcgcggcctgctggtcaccggcgatcccggagattggaatacgcgtgccgcctttgccgccaatgttagtctgaccgtatacttcggaagaacgacgcacttctggcagcatctcgcgcggaatatccagcacttccagcattttgtcgtcccagtccagggtatggatgttgaacaacatggtacgagaggcgttggtgtaatcggtcacatggacacggccctgagtcattttccagataagccacgtatcaaccgtaccaaacagcaattcaccacgacgtgcacgctcgcgagagccttccacatggtcgaggatccacttcactttggtgccagaaaagtacgggtcaatcaccagaccggtattgctgcggatataatcttctaaaccgtcacgttttaaatgctcgcagatttctgcggtacgacggcactgccagacaatggcgttatagataggcttgccggtttctttttcccagacaatagtggtttcacgctggttcgtaataccgatagctgcaatttgatcggaactgatatcggctttcgccagcacttctaccagcgtggagctttgggtggcccagatttccattgggtcgtgttctacccaacctggttttgggtagatttgctcaaattcgcgctggctcacgctaatgatattggcatcgtgatccattacgaccgcgcgggagctggtggtgccctggtcgagcgcaacgatatattttttttcagtcatgtttaattgtcccgtagtcatattacaggctagctttttgttcactaggagttgtggtttccttttcttccacaacacagatatcgcaaggcaaatggcgaccaatcagtttgcggtaggcaaatgcacctacaatcgcgccaacgatagggccgaaaagcggcaccaggaagtaaggaatgtctctgccgccggtaaaggcgacattgccccagcccgccagccaggcaaagactttcggaccgaagtcacgcgctgggttcatggcaaaacctgtcaatgggcccatagatgcgccaatgaccgcaatcagtagaccaatcagcaagggagccaaagggccgcgtggtacaccgttgccatcgtccgttaacgccaggatcagccccatcagaatagcggtaatcaccatctcaactgcgaaagcctgcacaaaattgatatgaggattagggtaagtagagaaagtgccagccagatcaacactttcaacgctgccgcgaacaatgtgatgagtctgctcgaagtcgaaaaataaattgtagtaaagcccgtaaactaaagccgcagcacagaaagcgccggcaacttgactaacgataaaaggaataactttgcgcttgtcgaaacaggcaaacagccacaatgcaatggtaacagcgggattaagatgcgcgccggaaacccctgcggtcaggtagatggccattgccacccccagtccccaaatgacactgatttcccactgaccaaaagacgcaccagcgacttttagtgctgcaacgcaacccacaccgaagaaaatcaacaacccggtaccgaggaattcagcaatgcactggcctttcaaggtacttgtttgactcataatcggatcctgaagagttaatgtttgttgtatgcgtgaaagtcacggacctccacgatgcttgtaggcatgctgtaaacttatcgttaacgagcaaaaacgagaaatatcgaacttaaaatgtgtgtgcctcgtcataaaatgagcgttatcgcgccatttattccatctgattgtacatgatgcatgtttgttagatcattcgcgcaacaaatttattaacattttcgattgatgtggattatgtcaccaggagaaggatgaaaagtgtggcaaaccgtaatctgcaaggcgtgccgctggacagcgatggcgcggcttcatacaatcggagctaactaaagtgcgctcgtatttattaaggcgtcaccggtaatcgggacgaggatttttatccatcaacgccttgcaattcaggagaggtatgacaatgagtttagaagtgtttgagaaactggaagcaaaagtacagcaggcgattgataccatcactctgttgcagatggaaatcgaagagctgaaagaaaaaaacaacagtctgagccaggaagttcaaaatgcccagcatcagcgcgaagagctggagcgtgagaacaaccatctgaaagaacagcagaacggctggcaggaacgtctgcaggccctgctgggtcgcatggaagaggtctgattacgcttcatcttccgcgtaatttctttactgtgtaggccaacaggtaacgcagaaaaaaggcaccttgcggtgcctttcttatcattcaatatccagcggatcttcactaagaataatcccggtattgtcggcataaagatggtcgccggagaagaaggtgacaccgccaaaattgacgcggacatcgctttcgccaatgccttcgccagcggcaccaaccggaattgccgccatcgcctggatgccgatatccaactcttccaggtcatctacctgacgcaccgcgccgtaaatgaccagaccttcccattcattttgtactgccagacgcgccagttcagcatcgaccagtgcgcgacgaacagaaccaccgccatcgacgacaagaacacgaccacggccattctgttcgagcagatcgtacagcaacccgttgtcctcgaaacattttaccgtgattatttgtccgccaaagctcgcccgtccgccaaagttggagaacagcggttccacgacgttaacatcttcttgatagatgtcacaaagctcggaagtatcgtatttcataggcttaacattcagttgctgcgagaattttcagtatatcgcgctatgtgggctgttggcaaaatcatcaattgttaattgatatttgtcagttatgctgcccactggcttaggaatatccctaaaacaaacagcaggttagtcagtaacgctcccttgacagtacgttccagcattggtcgcatcgccaccgggtccatttcccgcatcacataacgggcttgcttcaccagtaatggtgccgccagcaggaacagccagccccacaggctatgcaggctaaagagattaaacagcgccagacacaccaggctgcccatcagcaggcaggcatgataacgacgcgcgttcacttcacctaagcgcaccaccagcgtgtttttgccattttcgcggtcgctattgatatcacgcaggttattaatattcagtactgccgttgccagcaggccgcatgcggtcgccggaaggatcagtgccggaatcaatgtatgagcctgtaaataccagctccccatgacactcaaccagccaaagaaaaccagtacggaaatatcacccagaccgatataaccataaggacgattgcccacggtgtaggtgatagcggcaatgatgctcaacccgccaagaatcaggaaaccgacaaaatcggccagcgtatggcatgccactgcaaccagtgccagcccggagagacagatgagcacgacggtaataatgagcgcccgtttcatctcttgctgggtaatgacccctttttgcatgccgcgtagcggcccaatgcggtcaggtttatcgctgccttttaccgcatcgccgtaatcattggcgaggttagaaaggatctgtaatagcccggcggtaattagtgccagcagggcgaccagcggatcgaagtgaccttgccaccatgccagcgctgtcccgacgataattgcagcaaaggcgagggggagggttttaggtcgtaaactttccagccacgcctgagttcggctaatttgttgttcagtcataatacgcgccaataaaaatggggcctttcagccccatcaaacaatgatgaaaatgattgaacgcgattataggataaaacggctcagatcttcatctgccaccaacgcatccagatgtttgctcacataatctgcgtcaatagtgatattttgaccgcttaaatcgctggcgtcgtaggaaatctcttccattaaacgctccagaacagtgtgtaaacgacgagcaccgatgttttcggtagattcgttcacctgccatgccgcttccgcgatgcgtttaataccggagtcggtaaactcgatatttacgccttcagtcgccatcagtgctttgtactgcacggtgatagaggcattcggctcggtcagaatacgctcgaagtcgctggtggtcagcgcctgcagttcaacgcggattggcagacgaccttgcagttccgggatcaggtcagacggtttcgcaatctggaacgcgccagaagcgataaacagaatgtggtcagttttgaccatcccgtgtttggtggaaacggtgcaaccttctaccagcggcagcaggtcacgctgaacgccttcacgagaaacatccggaccggaagactcgccgcgcttacagattttgtcgatttcgtcgataaacacgatcccgtgctgctcaacagcgtcgatagcgtcttgcttcagctcttccgggttcaccagtttcgccgcttcttcttcaatcagcagcttcatggcgtctttgattttcagcttacgcgctttttgcttctggccgcccaggttctggaacatggactgcagctggctggtcatctcttccatgcccggaggagccataatttcaacgcccatcggtgctgcggcaagatcgatctcgatttctttgtcatcaagctggccttcacgcagttttttgcggaatgcctgacgagcagcggacggttcctgctgctgttcggtctgtccccagttgtttttagcaggtgggatcagcacgtcgagaatacgttcttctgccagttcttcagcgcgataacggtttttctcgatagcctggacgcgtaccattttcacggcggcatcggtcagatcgcgaataatagaatccacttccttaccgacgtagcccacttcggtgaatttggtcgcttcaactttgatgaacggcgcattcgccagcttagccagacgacgggcgatttcagttttaccgacaccggtcgggccgatcatcaggatatttttcggggtcacttcatggcgcagctcttcgttgagctgcatgcgacgccagcggttacgcagagcaatcgccacagaacgcttggcgttgtcctggccgatgatgtgcttatccagttcgctgacgatttcgcgtggggtcatttcagacatgggagatccttacgctttgtagcttaattcttcgatggtgtggaaatggttggtatagatgcaaatgtcgcctgcaatatccaacgccttttcagcaatttcacgggcgctaagttcagtgttttctaacagcgcgcgcgccgcagcctgggcgtaagggccgccggagccgatagcaataagatcgttttctggctgcaccacgtcaccgttaccggtgatgataaggcttgcagtttcatccgcgactgccagcagtgcttcaagtttgcgcagcatgcgatcggtacgccagtcttttgccagctcaacggcggctttgaccagatggccctgatgcatttccagtttacgttcaaacagttcgaacagcgtaaaagcatccgcagtaccgcccgcaaagcccgcgatgactttgtcgttgtacagacggcggacctttttcacgttgcctttcattacggtattgcccaacgtggcctgaccatcaccagcgatgaccacatggccgttacggcgtacgcttactatagttgtcacgagctgaccccttggttacgaatacagagtacaaaccccgtacaaaagtacggggcataatgcaattatagatgggggggattttgagggtttcaacccccggcggcgagccgaatgcagtttgtatgacccgccatcttcaaccgattgagggtgctgtctgcgttctctttgcctttcaccgggccaatgaccacacgattccagccattgttggtggtgattttgctgtcaaagccttcgaacgccagctgagcacgtaccgtctctgcctgttccgcgcctctgaagctaccgcactgcaccatccagcggcgttcgtcttttttctccgccgtcggttttggcgcgtcagcggcacgagcaactggcgcagcttgctgcggcttgctctgcgcagtcgtgtgcgcaggagtttgcagcagatcctggtacggctgctgagaagaagccggtttagactggcgcggttgcgcctgtaccggtgcggcttggctcgtacgcgtctgctgctgccagctttgttcagtcgtacggctctgctgagccaggcgttgctgttccgctaattgctgcgcctgacgttggcgctgtagcgtttgctgacgctgttccggcgtctgttcattccacggaacttcaaccagctgcgttggctgctggcgcatatcagcctgcatttgttcaagaagctgacgttgttctggtgtcagttgctccggcgttttcacttcaccaccggcagaaggttctgtgggcgcacgcactcccggctggcgactttccagctctttaatgtagcgccagcgttcttctggttttggtggtagtccgtttccggtcactttctggctttgcagcgtctcggactcttctttcttgtgatgcgtaatgaagtacagaccaccgataaaggtcacaagaacggcggcagcaatagcgaccatagcgggagaaaccgcaggcagatttcgttgctttttccgactggtgctcttttttcgccggctaggtgccggttggctgcggcgtacataatctcgttgtgccactatcgtttcgctgtatttattcgttcgtcagcccgccatgttacttaagcggcgggcctttgaccagtcacggcagtcttaaaggtttactttaaggtaacgcgcgtgtacttccccggatgataagttcgcagtccattaaacgagagccactgccaacgtgttgcccctgcatttgatcaagcaataacagcatagcttcccgaccgatttcgtaacgcggctgcgcgatggttgtcagcggcggatcacaaaattgcgtcaggtcgatgttatcaaaaccgattatggaaaggtcttccgggactttcagcccctggcgttttgcctgagaaagtgcgccgagcgccatcacatcgctatggcagaagacagcagtaggcggttgtggaagatcaagcagctgctgcatcgctttgcttccggcttcgaaggtgaagtcgccacgggcgatgtattgcggatcaaccataatgccgcagcgacgcagcgcctgaacatagccttgcaggcggtagtgacacagcggcatctcttcgggaccggctatacagccaatccgtttatgcccttgctcatataaataatttactgcatcaaatgcggcggtcagattgtcgatatgaactgtaggcagctccagctccggtgcaaattcgttcgccatcaccatcggcggcagattacgctgttcctcaatgctggcatcaaacggcagcctactacccagcaacaacatgccatcaatttgcttggtgatgatcaaatcgataaaggttttttcctgctgattttgatgcgcacagtcgccaatcagcaccagatatccgtgatttgccgccgtaacttcgataccgcgaataatttcgctaaagaagggatcgcagatatccgggacaatcaccagaatggtgcgggattcattacgcttgacgttgcgccccataggctgcggtaaataacccacttcccgggccgctttttcaacccgattacgggtggcctgggagactttatcgggattcattaatgctcgggagacggtcgctgtagagacttttgccttgagggcaacgtctttcatggtcgcggcagtttcctgcttcttcgctttcacactcactcctcgcctggcacgtcaggcgtactacatccatgtttacttcacatcggcaacatttttagcagatagcgcgtgaaaacggttacagaattttcatgaaaagtgtgatgaatattgaatttttcgatccgcctcgcatcgtgagcggtttaaccctcaatcggatcaacatccagcacccatttcaccttacgggaatccggtattgtattgatgagcgccagcgtaccgttaatgatgtgttgcaagcgcacgcgggaagggtgctgcaacaatatctgccagcgccagcgaccgccacgtttaggtgccagagccggaaccggaccgagaacccacagtttctcgtctgccagtgggctggagaggatcagattacgcagttgttgcaggaacaatggcgcgtgctgattgttatgatcttccgcacgcacaatcacatggctggtccacggcggtagctgcatcattcgccgctcagccagcgcctgttcggcaaaggcgtcgtagcctttatagagcaacgtttgcaacagaggatgttccggatggtgcgtttgcagcaccacttcgccctgtttacccgcacgcccggcacgaccggcgacctgggtgtaaagctgagcgaaacgctctgcgctgcgaaaatcggcagaaaacagcgcgccgtccacgtccagtaatgcaaccagcgtcacatccgggaaatggtgacctttcgccagcatttgtgtaccaatcaaaatccgcgcgccgccgcgatgtacttctgccagttgctgttccagcgcccctttgcggctggtggtatcgcggtcgatacgagaaatgggcacgccggggaacaacggcgcgagcgtctgttcaagctgttcggtgcccagccccacggggaccaggtgcgtggaaccgcaggaagggcactggcgcggcaccggacgctgactgtcacagtggtggcagcgcagatggtgctgcgcctgatgcagcgtgtagtagtgatcgcaacgtgggcattcggcaatccagccacagtcgtggcacagcagtgcaggcgcaaagccacggcggttaagaaagagaatgacctggttatcagcctgtaaatgctggcgcatacgagtgattaacgccggagccagacctgcctgcaccttctgaccttttaaatccagcacatgttgaattgccggacgcgcattccctgcccgacgggtcaggcgcagcaggcggtattttttctgctggacgttgcataacgtttccagcgcgggcgttgcggagccaagaataatcgggatttgctcgctgtgcgcacgatacaccgccaggtcgcgggcatgatagcgccagccttcctgctgcttgtaggagctgtcgtgctcttcatcaatgacaatcacgccgagatttttaaacggcgtaaacagcgcggagcgggtgccgatcacaatcgccgcctcaccatttttcgctttcagccacgcgctaagacgctcgctgtcgttcaggccggaatgcagaacttccacgggggcattaaaacgttcacgaaaacgggcgatagtttgcggtgtcaggccgatttccggcaccatcaccagcgcctgtttgccctgagcgagcacgttttccagtacgctgagataaacctccgttttaccggaaccggtaacgcccgccagcagccaggcagaaaaagtatctgccgcgctatgaattgcgccaacggcggtggcctgttcggtattcaatcgcaaccgctcaccagaaacggcatagttcgttcgccagtcgctaaactctggtgtttcacttgctaaatcacacagaccttttttgcgtagcgcctgcaacgcggcatcattaaattcgagcgtggcgacctggtcgcgccagattttgccttgccgtaacgccgccagcgcctgttgttgcttgggggagcgtttcaggctgttcagatccaccgcctggccttgttcagtggcaaaccagtaccacatcggcgcgttcgccgcaggccgcccctggcgtagtaaaatcggcaaggcatgaaacagcacatcgccaatcggatgatgatagtaatctgccgcccatagcagcaatcgccagacggagtgagtaaacaccggctcactatccagcacttcgactaccgcttttagctcattgagcggcagttcgctggcatcgctaacacttaccacaatcccgatgcgctcctgctgtttgccaaacggcacgcgcacgcgacacccagctttaaccgtcatgccttctggcagcagatagtcaaaggtacgaggaagcggaacgggcaaggcaacgtgggcaacgggcatagcatcatcctgacttgaaattcggtgggttagtatacacattgccgtagaagagtgcggatcagtttgcatacgctggttaatttctgtatgatttcgcgccttcgtacgaaatgatcgtattgaagctatacttttaacatcgcgtggtgtctggcgttagggctggaagagcgacgcggccttaaaccgaggttttcccatgaaaaaagatattcacccgaaatacgaagaaattactgctagctgctcttgcggtaacgtaatgaaaatccgctccaccgttggtcatgacctgaacctcgacgtgtgcagcaagtgccacccgttcttcactggcaaacagcgtgatgttgctaccggtggccgtgttgaccgcttcaacaagcgtttcaacatcccgggcagcaaataagaccggatttccgaaaaaagcgccgcacggcgctttttttgtgcctgaattttggtcgtattaccagctaaacagcggccattctttggcgaccgtggtgagttgtggcgcatcgaaaacggcttgtgggctgaccaccgtttcctcaagcggaatattcttgccgtaacgttctttgagctttgcctgaacttgtgggctgctcaggtcgaactctttcaacttctgctgctcgcccacgcgcattcccagcgcgttctggtaaaccttccacaccacttcgctacagtactggcgatcgtcgctccaactgaagctgaaatcatacggtttaccgagataacgttttgccgtttgcgccagtttttgctgttgttcaacactcagtccgccttcaacgcggcgaacaacgtatttgcccttttcaccatgggcgatccactgcttgagcggggtgtatttcaccgggccgactgcttcaaaaacgtagggctttttgttgcgtatcaccagcataccggtgtggctataatcggtatgggtcgccagttggatcgctttactttggctactgcgagagatctgaaagatgatgtcgccggtttgtggctgccaggcaaaggcaggtacagaaaccagcaggctgaggatcagcagcctgtttttcatagttaaacgtccatgtataaaaagcggtgggtcgcagacaacgtgctcgttgtttatgccggatgcggcgtgaacgccttatccggcctacaagttcgtgcaaattcaataaattgcaatatgacgtaggcctgataagcgtagcgcatcaggcgattccactccgcgccgctcttttttgctttagtattcccacgtctccgggttaatccccatctcacgcatgatctcttttgccgcttccgggatttcgtcgctgcgctctttacgcagatcggcatcatccggcaaaggttgcccggtaaaggcatgcagaaacgcttcgcacagcagctcgctgttggtagcgtgacgcaggttgttcacctgacgacgcgtgcgttcatcggtgaggatttttaacaccttaagaggaatggaaaccgtaatctttttgacttgttcactcttcttgccgtgctcagcgtatgggctgatatattcgccgctccattcagccatgagatacttaatcctcttcgtcaataaattgagaccagaccacacagttgatgtgggtactgaccgtaaacccgcatagtttaccgtacaggcgttaccgtgacatcgtgtaatgcacctgtcggcgtgataatgcatataattttaacggctatttgggatttgctcaatctatacgcaaagaagtttagatgtccagatgtattgacgtccattaacacaatgtttactctggtgcctgacatttcaccgacaaagcccagggaacttcatcacatgacgcgtaaacaggccaccatcgcagtgcgtagcgggttaaatgacgacgaacagtatggttgcgttgtcccaccgatccatctttccagcacctataactttaccggatttaatgaaccgcgcgcgcatgattacagccgtcgcggcaacccaacgcgcgatgtggttcagcgtgcgctggcagaactggaaggtggtgctggtgcagtacttactaataccggcatgtccgcgattcacctggtaacgaccgtctttttgaaacctggcgatctgctggttgcgccgcacgactgctacggcggtagctatcgcctgttcgacagtctggcgaaacgcggttgctatcgcgtgttgtttgttgatcaaggcgatgaacaggcattacgggcagcgctggcagaaaaacccaaactggtactggtagaaagcccaagtaatccattgttacgcgtcgtggatattgcgaaaatctgccatctggcaagggaagtcggggcggtgagcgtggtggataacaccttcttaagcccggcattacaaaatccgctggcattaggtgccgatctggtgttgcatagttgcacgaaatatctgaacggtcacagtgacgtagtggccggcgtggtgattgctaaagacccggacgttgtcactgaactggcctggtgggcaaacaatattggcgtgacgggcggcgcgtttgacagctatctgctgctacgtgggttgcgaacgctggtgccgcgtatggagctggcgcagcgcaacgcgcaggcgattgtgaaatacctgcaaacccagccgttggtgaaaaaactgtatcacccgagcttgccggaaaatcaggggcatgaaattgccgcgcgccagcaaaaaggctttggcgcaatgttgagttttgaactggatggcgatgagcagacgctgcgtcgtttcctgggcgggctgagcttgtttacgctggcggaaagtttagggggagtggaaagtttaatctctcacgccgcaaccatgacacatgcaggcatggcaccagaagcgcgtgctgccgccgggatctccgagacgctgctgcgtatctccaccggtattgaagatggcgaagatttaattgccgacctggaaaatggcttccgggctgcaaacaaggggtaaaaatgagtgtgattgcgcaggcaggggcgaaaggtcgtcagctgcataaatttggtggcagtagtctggctgatgtgaagtgttatttgcgtgtcgcgggcattatggcggagtactctcagcctgacgatatgatggtggtttccgccgccggtagcaccactaaccagttgattaactggttgaaactaagccagaccgatcgtctctctgcgcatcaggttcaacaaacgctgcgtcgctatcagtgcgatctgattagcggtctgctacccgctgaagaagccgatagcctcattagcgcttttgtcagcgaccttgagcgcctggcggcgctgctcgacagcggtattaacgacgcagtgtatgcggaagtggtgggccacggggaagtatggagcgcacgtctgatgtctgcggtacttaatcaacaagggctgccagcggcctggcttgatgcccgcgagtttttacgcgctgaacgcgccgcacaaccgcaggttgatgaagggctttcttacccgttgctgcaacagctgctggtgcaacatccgggcaaacgtctggtggtgaccggatttatcagccgcaacaacgccggtgaaacggtgctgctggggcgtaacggttccgactattccgcgacacaaatcggtgcgctggcgggtgtttctcgcgtaaccatctggagcgacgtcgccggggtatacagtgccgacccgcgtaaagtgaaagatgcctgcctgctgccgttgctgcgtctggatgaggccagcgaactggcgcgcctggcggctcccgttcttcacgcccgtactttacagccggtttctggcagcgaaatcgacctgcaactgcgctgtagctacacgccggatcaaggttccacgcgcattgaacgcgtgctggcctccggtactggtgcgcgtattgtcaccagccacgatgatgtctgtttgattgagtttcaggtgcccgccagtcaggatttcaaactggcgcataaagagatcgaccaaatcctgaaacgcgcgcaggtacgcccgctggcggttggcgtacataacgatcgccagttgctgcaattttgctacaccagtgaagtggccgacagtgcgctgaaaatcctcgacgaagcgggattacctggcgaactgcgcctgcgtcaggggctggcgctggtggcgatggtcggtgcaggcgtcacccgtaacccgctgcattgccaccgcttctggcagcaactgaaaggccagccggtcgaatttacctggcagtccgatgacggcatcagcctggtggcagtactgcgcaccggcccgaccgaaagcctgattcaggggctgcatcagtccgtcttccgcgcagaaaaacgcatcggcctggtattgttcggtaagggcaatatcggttcccgttggctggaactgttcgcccgtgagcagagcacgcttagcgcacgtaccggctttgagtttgtgctggcaggtgtggtggacagccgccgcagcctgttgagctatgacgggctggacgccagccgcgcgttagccttcttcaacgatgaagcggttgagcaggatgaagagagcttgttcctgtggatgcgcgcccatccgtatgatgatttagtggtgctggacgttaccgccagccagcagcttgctgatcagtatcttgatttcgccagccacggtttccacgttatcagcgccaacaaactggcgggagccagcgacagcaataaatatcgccagatccacgacgccttcgaaaaaaccgggcgtcactggctgtacaatgccaccgtcggtgcgggcttgccgatcaaccacaccgtgcgcgatctgatcgacagcggcgatactattttgagcatcagcgggatcttctccggcacgctctcctggctgttcctgcaattcgacggtagcgtgccgtttaccgagctggtggatcaggcgtggcagcagggcttaaccgaacctgacccgcgtgacgatctctctggcaaagacgtgatgcgcaagctggtgattctggcgcgtgaagcaggttacaacatcgaaccggatcaggtacgtgtggaaagcctggtgcctgctcattgcgaaggcggcagcatcgaccatttctttgaaaatggcgatgaactgaacgagcagatggtgcaacggctggaagcggcccgcgaaatggggctggtgctgcgctacgtggcgcgtttcgatgccaacggtaaagcgcgtgtaggcgtggaagcggtgcgtgaagatcatccgttggcaagtctgctgccgtgcgataacgtctttgccatcgaaagccgctggtatcgcgataaccctctggtgatccgcggacctggcgctgggcgcgacgtcaccgccggggcgattcagagcgatatcaaccggctggcacagttgttgtaatttcagaaatttaataatgcccggtactcatgttttcgggtttatggtttctaatgaaatatattgaattatcataggattaggccggattaagcgtttacgacgaatccggcaagaagcaataagtacatggttagtttatatttgcagtccggtttgctttgcataccggattttctttttcttaccatcctgaagttttttcatcttccctgatttttcctcaccatcattggtcatttttcggttgacgcccttcggcttttccttcatctttacatctggacgtctaaacggatagatgtgcacaacacaacatataactacaagcgattgatgaggtaaggtatgagcttttttcacgccagccagcgggatgccctgaatcagagcctggcagaagtccaggggcagattaacgttagcttcgagtttttcccgccgcgtaccagtgaaatggagcagaccctgtggaactccatcgatcgccttagcagcctgaaaccgaagtttgtaagcgtgacctatggcgcgaactccggcgagcgcgaccgtacgcacagcattattaaaggcattaaagatcgcactggtctggaagcggcaccgcatcttacttgcattgatgcgacgcccgacgagctgcgcaccattgcacgcgactactggaataacggtattcgtcatatcgtggcgctgcgtggcgatctgccgccgggaagtggtaagccagaaatgtatgcttctgacctggtgacgctgttaaaagaagtggcagatttcgatatctccgtggcggcgtatccggaagttcacccggaagcaaaaagcgctcaggcggatttgcttaatctgaaacgcaaagtggatgccggagccaaccgcgcgattactcagttcttcttcgatgtcgaaagctacctgcgttttcgtgaccgctgtgtaagcgcgggcattgatgtggaaattattccgggaattttgccggtatctaactttaaacaggcgaagaaatttgccgatatgaccaacgtgcgtattccggcgtggatggcgcaaatgttcgacggtctggatgatgatgccgaaacccgcaaactggttggcgcgaatattgccatggatatggtgaagattttaagccgtgaaggagtgaaagatttccacttctatacgcttaaccgtgctgaaatgagttacgcgatttgccatacgctgggggttcgacctggtttataaatagtgtggcttttgtgaaaatcacacagtgatcacaaattttaaacagagcacaaaatgctgcctcgaaatgagggcgggaaaataaggttatcagccttgttttctccctcattacttgaaggatatgaagctaaaacccttttttataaagcatttgtccgaattcggacataatcaaaaaagcttaattaagatcaatttgatctacatctctttaaccaacaatatgtaagatctcaactatcgcatccgtggattaattcaattataacttctctctaacgctgtgtatcgtaacggtaacactgtagaggggagcacattgatgagcacgagtgacgatatccataacaccacagccactggcaaatgcccgttccatcagggcggtcacgaccagagtgcgggggcgggcacaaccactcgcgactggtggccaaatcaacttcgtgttgacctgttaaaccaacattctaatcgttctaacccactgggtgaggactttgactaccgcaaagaattcagcaaattagattactacggcctgaaaaaagatctgaaagccctgttgacagaatctcaaccgtggtggccagccgactggggcagttacgccggtctgtttattcgtatggcctggcacggcgcggggacttaccgtagtatcgatggacgcggtggcgcgggtcgtggtcagcaacgttttgcaccgctgaactcctggccggataacgtaagcctcgataaagcgcgtcgcctgttgtggccaatcaaacagaaatatggtcagaaaatctcctgggccgacctgtttatcctcgcgggtaacgtggcgctagaaaactccggcttccgtaccttcggttttggtgccggtcgtgaagacgtctgggaaccggatctggatgttaactggggtgatgaaaaagcctggctgactcaccgtcatccggaagcgctggcgaaagcaccgctgggtgcaaccgagatgggtctgatttacgttaacccggaaggcccggatcacagcggcgaaccgctttctgcggcagcagctatccgcgcgaccttcggcaacatgggcatgaacgacgaagaaaccgtggcgctgattgcgggtggtcatacgctgggtaaaacccacggtgccggtccgacaagtaatgtaggtcctgatccagaagctgcaccgattgaagaacaaggtttaggttgggcgagcacttacggcagcggcgttggcgcagatgccattacctctggtctggaagtagtctggacccagacgccgacccagtggagcaactatttcttcgagaacctgttcaagtatgagtgggtacagacccgcagcccggctggcgcaatccagttcgaagcggtagacgcaccggaaattatcccggatccgtttgatccgagcaagaaacgtaaaccgacaatgctggtgaccgacctgacgctgcgttttgatcctgagttcgagaagatctctcgtcgtttcctcaacgatccgcaggcgttcaacgaagcctttgcccgtgcctggttcaaactgacgcacagggatatggggccgaaatctcgctacatcgggccggaagtgccgaaagaagatctgatctggcaagatccgctgccgcagccgatctacaacccgaccgagcaggacattatcgatctgaaattcgcgattgcggattctggtctgtctgttagtgagctggtaagcgtggcctgggcatctgcttctaccttccgtggtggcgacaaacgcggtggtgccaacggtgcgcgtctggcattaatgccgcagcgcgactgggatgtgaacgccgcagccgttcgtgctctgcctgttctggagaaaatccagaaagagtctggtaaagccagcctggcggatatcatagtgctggctggtgtggttggtgttgagaaagccgcaagcgccgcaggtttgagcattcatgtaccgtttgcgccgggtcgcgttgatgcgcgtcaggatcagactgacattgagatgtttgagctgctggagccaattgctgacggtttccgtaactatcgcgctcgtctggacgtttccaccaccgagagtctgctgatcgacaaagcacagcaactgacgctgaccgcgccggaaatgactgcgctggtgggcggcatgcgtgtactgggtgccaacttcgatggcagcaaaaacggcgtcttcactgaccgcgttggcgtattgagcaatgacttcttcgtgaacttgctggatatgcgttacgagtggaaagcgaccgacgaaagcaaagagctgttcgaaggccgtgaccgtgaaaccggcgaagtgaaatttacggccagccgtgcggatctggtgtttggttctaactccgtcctgcgtgcggtggcggaagtttacgccagtagcgatgcccacgagaagtttgttaaagacttcgtggcggcatgggtgaaagtgatgaacctcgaccgtttcgacctgctgtaatctgaccccgttcagcggctgcttgctggcagtcgctgaacgttctttaccagcgtatagtgggcgaacgaaaactacacactggatctctcatgtctgccgcaggaaagagcaacccactggcaatcagtggcctggttgtgctcacacttatctggagttatagctggattttcatgaagcaagtcaccagttacatcggtgccttcgactttaccgccttacgctgcattttcggcgctctcgttttattcatcgtccttttattacgtggtcgcggaatgcgcccgacaccgtttaaatacaccttagccattgccctgttacaaacctgcgggatggttggtctggcgcagtgggcgttggtcagcggaggtgcggggaaggtggcgatcctgagctataccatgccgttctgggtggtgattttcgccgcgttgtttctcggtgaacgcctgcgacgtgggcaatatttcgcgattctgattgccgctttcggcttatttttggtgttgcagccgtggcaactcgatttctctagcatgaaaagtgccatgctggcaatcctctccggcgtcagttggggggcgagcgcgattgttgctaaacgtctgtatgcccgtcatccgcgcgtggatttattgagcttaacatcctggcagatgctgtatgcggcgctggtgatgagtgtggtcgctttactggtgccgcaacgtgaaattgactggcagcccaccgtgttctgggcgctggcctacagtgcgattctggcgacggcactggcgtggagcttatggttgtttgtattgaaaaacttgcctgccagtattgccagcttaagcacactggccgttcccgtttgcggcgtactcttttcctggtggctgctcggcgagaatccgggggccgttgaaggtagcggtattgtgctgattgtgctggcactggcgctggtgagccgtaagaaaaaagaagccgtcagtgtaaaaaggatctgaattttttcttcatgtggggcgatctcttatttaacaaaataacgataatgccccaccatccgccagttaaacagcacatcttcttcctgcgcgcctgcgccaatgttatgtatcaccagcggcgtaccgtcgcgggcgaagccatcactaaccaccccaatatgtgccagcccgttatccagtcgccaggagacaatatcgcccgcttgatagtcactggggttcttgctggtggggcgtgttttatcatggcggctaaaccaggtttccagattaggcacccgacggtgatcgatgttgctgtccgggcgctttaacttccatttttgcgggtactcagcaaaattcttcgccatatcttcgtgaaccagtttctgcaaatcgaccttctggctgcgcaatgcgcggatcaccacatcggaacatacaccgcgttcttgcggaacatcaccgccaggataagtaagctgcacatacgccggatcgtaaaatagcgtgctgccaatttgctgtctggcaccgtctgcgatggcaaggttggtattggcctggatttgtaccacggttggtggaacggcgggagattttaaggagtggctggtaaatgccgttagcaggctgagcagcgccagactagctttcatctggttcgtccgtgaaaataagagtcacagattcgaccttccgggctaacgattgttctgtagagaaaatgtccagaagcggataaaaaattcctgaacaacgtgggagtttcagattactggcacagagtgccggatgcggagtgaacgccttatccggcctacaaaagcacgcaaattcaatatattgcagagattgcgtaggcctgataagcgtagcgcatcaggcaattttgcgttcaaactcccggacaagccgggagtttggagtaggttattcccactcttgcaggaaacgctgaccgtactggtcggctaccagcagagcggcgtaaacctgatctggcgtcgcgccgccaggcatgttgtgaatggtttcaccttctgcacatgccgcttctgccacaattcgcattttcgccgggacatcttctttaatatccagttgagcgagagttattggcaaacctaccgcatggctaagggcagctacggtttcgatttcctccaccggcgcattttccagaaccagctgcgtcagcgtaccgaatgccactttttcaccgtgataatagtgatgcgcgtccgggatagcggtcaggccgttatgcactgcgtgcgccgcagccagaccaccactttcaaaaccaacaccgctcaaataggtgttcgcttcaatcacgcgctccagcgccggagtcactacatgctgttcggcagcaagcatcgctttttcgccttcttccagcagggtgttgtagcacagttcagccagtgccagcgcagcctgggtgcacttgccgcccgccatggtggtcgcgccgctacgagagcaggcacgcgcttcaaaccaggttgccagcgcatcgccgatacccgccgctaacagacgtgcaggtgcgccagcgacgattttggtgtcgacaatgaccatattcgggttatttggcaacagcagatagcggtcaaactcaccctcatcggtgtagataacagacaatgcgctgcacggtgcatcggtagaggcgatagtcggtgcgatcgctaccggaacacccatgaaatgtgccagtgctttggcagtatcgagggtttttccgccaccgataccgagaattgcgccacactgcgcagtctccgcgatgccacgcagacggtcgatctcattttggctacattcaccgccaaacggcgcaatttctactaccagtccagcatctttaaagcttttctcgacagtggattgagcaaaacctaaaacaaatttgtcacccaccactaaccagcgttctgccagcggcttcaggtattcgcccagacgattaatcacatcagcgccctggatgtatttacccggactttgaataatgcggtccataattgctcctttagagatgagtagtgccaaatgcggcattccagtcgtgttcgaacttctctatagcactctctaccgcaggggtgttgagcatttgttgcgctacatctaagggcagggtgatggattcacatcctgccagtaaacagtccagcgcctgacgcggcgttttaaagctggctgccagcaccatgctttctggcgcgtgcatttctaacagcgtttgcagctcctgaaccgtacgaatgccgtctccgccctgggcatctacgcggttaacatacggagcaacgtattttgcccctgccagtgcggctaataacccttgtgcggcgctatatacagcagtgccaagtgtagtaataccctcttttttcagtattttaattgctgccagaccttcggaagtcaccgggattttcaccacaatacccggaatagcgtcgcgcaggcgcttcgcttcttccaccatcccctgcgcgtcgcggctcatggtctgagcaaacagaatgccctcatcaccaatcgctttttgcagacgcggcagcacttcccatatggactccttgctggcagcgataatgctcgggttagttgtcaccccggcaatggggaatatgcgtgccagacgttcgacttctgcgacgttagcggtgtccagatacagttccatgatgtttccttttacagttccagttcatgttgcagcaggctggcgatagcgtcggcagaggcggcgttaaccagcgcgttacggaattcttcgtgcatgatgcggcgagcgaggcggctgaaaatgcgcatatgctgatcgcccgcagcgtgtttgttcagggttaacataatgatgaattgcgcttcatcatcgccccagcgcaccggcgcttgcagacgcgccacgctgatggtggattgctcaatgtgttcacttttgctgtgtggaatggcaaaactaaagcccagaccggtagagaaaacggcctcgcgcgcccacaagtcggcttccagtttacgcggatagcggcagcggcccgccagcagcaggttatcggtcatgcctttgagcacttcttctttgctgcgccagtcgctttccagtgtgatgcactcggcggtgaccagcggtgcgtcttgttgggtcatgcggaattgcgccagcaggtgttctacttccaggctagtacggcaggccattgcctggttgagcaacttgcggcactcacggctatcaagttgcgccatccgagctttcgccgccggaatacttggtgcgctcatgctgagttcatccagccctaagccgaccagcaacggcagcacggaacctttcgctcccagctcaccgcacagaccaatccatttgccctggcgatgcaccgcttgcacggcgtaatcgagcgcccgcaagaatgccggattcaggctgttgtagtgacgagtaaccttagcgttatcgcgatccaccgccagcagatactgcgtcaggtcattactaccaatactaaagaaatcaatctcttcgcagcattgatcgatgatgaacatcacgctcggcacttccagcatgatgccgagctggattttctcatcaaacggaatgtgttcgttacgtagttgctgtttggcttccgccagtttttctttcacccataagatctcttccatactggagatcatcgggatcatgattttcaggctgccgtgagcggaggcgcggaggatgctccgtagctgcgtggtaaacaagctcgcgtactcttcataaatacgcacggcgcgataaccgaggaacgggtttgcctctgcgggaatgttcagataatcaacgggtttgtcgccgccaatgtccatagtgcgcacaataatgctgcgtccgttggcggattccagcgcctgacaaaaaatgttgtacaactcgctttcgcccggtgcgctggtgcgatccatatagagcatttcagtgcggaacaaaccaacgccttccgcaccattgccgaatgcggcctgcgcttccacggagtgagcgatgttagcggcaatttcaatgcggataccgtcagcggtacgggcttgttgggtcagccagacacgctgttgctcacgcagggcgtcctgtacgcgggcttcttgctgataataacgagctacggcttcccctggctcaaccacaatcgccccggcgttgccgtcgatataaatcgtttgttgctgccacggagtaagggcatcaatatccacaccaaccagcgttggaatgttgaagctacgggcaaggatcaccgtatgactggtggtgccgccgcttttgagcaacaatcctttgaggtgatttttatccagttcgaggaactggctgggggtcagttcatcagccatacaaatggcgggctgcgtcagtttgcccggtgccgggaagcgttgctcaccgtagatttgctggagtaactggaagcagacgtcgcgtacgtccagggcacgttcttgcaggtagctgctgctggaacgggaaaactcttcgcaaaagtgattcgcgctggcaacaattgcttcggcgcagcttaatccggcgctgacgcctgccagtaaatgttcgcgcagggaagtatcgccagccagggatcggtgagcttccagaatcgcgctggtagcaccgtcgctatccagcagacgaaactcaatgtttttcagtaccagcgtcaggccgttttccagtgcggattgctcggcgtcaacgcctttggctgcgggaagattacccagcgcattgagatctaaagaagagatcggcgtcagaatgccgcctgcactaccgctgcacacggtgcgggcgcggataatttgcggattcagattggtcagactaaccggcagtggttccagttcgtcagatttaacttccgccagcggcgcatcgcagtgggggaattcatcgcgcagccattggcttaaacgctggtgcgcttcctgttcgtcggccccggaaatcagtaactggcagttatcgcccgccagcgtatcggtgccaatcagcgcaagggcgcttttggcgttgcccttgcggtcagtgcgcaggttatgccactcaatttgactactaaaagtattacacagcgtttcaacgtggcttgccggacgcgcatgtacgccgttaggtagctcacaaataaattccacaatcagggccattgcctctctcccggtacggttttctgtttacaggataagagcgcacggcaacggcctgccatgtgacaaatctgccaaaagctggacaaatgtaatgtaaccgtcaatttgcgacgcgtctcacaagacgctgttttgcggcatgcttccggtttatcgcaagttatgaggcggatcgcatttttgtactgatattacaaaagtccagtaaatggcctttttatccactgtttgctccgcctgcgattgcctattgtttcctccatcaaaaatatggacatgggctttcgcaagcccgggagcagcttatgaatgagttggtgcagatcctgaaaaatacccgtcagcatttaatgacgggcgttagtcacatgattcccttcgtggtaagcggcggtattttgctggcggtttccgtcatgttgtatggcaaaggcgcagtgccggatgccgtagccgatccaaatctgaaaaaactgtttgatatcggcgttgcgggcttgacgctgatggtgcctttcctcgcagcgtacatcggttattccattgcagagcgttctgcgctggctccgtgcgctatcggtgcctgggttggtaacagctttggtgcgggcttctttggtgcactgatcgccgggattatcggcggcatcgtggtgcattacctgaagaaaattccggtgcataaagttctgcgcagcgtgatgcctatcttcattattcctatcgtcggcacactgattaccgcaggcatcatgatgtggggcttgggcgagcctgtaggggcgttgaccaacagcctgactcagtggcttcaggggatgcagcagggcagcattgttatgctggcggtgatcatgggtctgatgctggcgttcgatatgggcggtccggttaacaaagtggcctatgccttcatgctgatttgcgttgctcagggtgtttataccgtggtggccatcgctgccgtgggtatttgtatcccgccgctggggatggggctggcgacgctgattggtcgtaaaaatttctccgcagaagagcgcgaaaccggcaaagcggcactggtgatgggctgtgttggcgttactgaaggggcgattcctttcgccgctgccgatccgctgcgtgtcattccttccatcatggtcggtagtgtttgtggtgcagtaactgcggcgctggtcggtgcgcagtgctatgcaggctggggtggtctgattgtgctgccggtggttgaaggcaagctgggttatatcgcagcagtggctgtcggagcagtggtgacggctgtttgtgtgaacgtgctgaaaagtctggcgcgtaaaaatgggtctagcactgatgaaaaagaagacgacctggatttggattttgaaattaattaattgaggaacgagccatgacgaaaattattgcagtaaccgcatgtcctagtggtgttgcccatacctatatggcagcagaggcgctggaaagtgccgcgaaagcgaaaggctgggaagtgaaagtagaaacccaggggagtattggtctggaaaatgaactgactgcggaagatgtggcgagcgctgatatggtgattctgaccaaagatatcggcatcaagtttgaagagcgttttgctggcaagaccatcgtgcgcgtcaacatcagcgatgcagtaaaacgtgctgacgccattatgagcaaaattgaagctcacctggcgcaaaccgcttaagttcttctcccgctcgcaagggcgggttcgctttcccacaggagttcctcatgacgaatcgtatctctcgcctcaaaactgcactgtttgccaatacccgtgaaatcagcctggagcgggcgctgctttataccgccagccatcggcaaaccgaaggcgaaccggtgatattgcgccgggcgaaagcaacagcgtatatccttgaacatgttgaaattagcattcgtgatgaagaactgattgccggtaaccgcaccgtaaaaccgcgcgccgggattatgagcccggaaatggacccttactggctgctgaaagagctggatcaattcccgacgcgtccgcaggaccgctttgctatcagcgaagaagataaacgtatctaccgtgaagagttgttcccgtactgggaaaaacgtagcatgaaagatttcatcaacgggcagatgacagatgaagtaaaagccgcgaccaacacgcagattttcagcatcaaccagacggataaaggccaggggcacattattattgattacccacgcctgttgaatcacgggctgggtgagctggtggcacagatgcagcaacattgtcagcaacagccggagaatcacttttatcaggccgcgttgttactgctggaagccagccagaaacacattttgcgttacgccgaactggcggaaacgatggcggcaaactgcacagatgcccagcgtcgcgaagagctgctgactattgcagagatctcccgccataacgcgcaacataagccgcagacgttctggcaggcgtgccagttattctggtacatgaacatcattctgcaatacgaatccaacgccagtagcctaagcttggggcgcttcgaccagtatatgttgccgttctatcagacaagtttaacccagggcgaagatgcggcgttcctgaaagaactgctcgaatctttatgggtgaaatgcaacgacatcgtgctgttgcgctccaccagtagcgcgcgttatttcgccggtttcccgaccggctataccgcactgctcggcgggttaaccgagaacggacgtagcgcggtgaacgtgcttagcttcctttgccttgacgcctatcaaagcgtgcaattaccgcaaccgaacctcggcgtgcgcactaacgccttgatcgacacgccgttcctgatgaaaaccgccgaaaccattcgcttcggtaccggtattccgcaaatctttaacgatgaagtggtggtgccagcgttcctcaaccgtggcgttagcctggaagatgcgcgcgactattccgtagtgggctgtgtggaattatctattcccggcagaacctacggcttgcatgacatcgcgatgtttaatctgctgaaagtgatggaaatctgcctgcatgaaaatgaaggcaatgctgcgctgacttatgaaggtttactggagcagatccgcgccaagatcagccactacatcaccctgatggttgagggcagcaatatttgtgatatcggccatcgcgactgggcacctgtaccgctgctcagtagctttatcagcgattgtctggaaaaaggccgcgatattaccgatggcggcgcgcgttataacttctccggcgtacaggggatcggtatcgccaacctgagcgattctctccatgcgttgaaagggatggtttttgagcaacagcgtttaagttttgacgaattgctgagcgtattaaaagccaacttcgcaacgccagaaggcgaaaaagtccgcgctcgcttaattaaccgcttcgagaaatacggtaacgatatcgacgaggtggataacatcagcgccgaactgttgcgccactactgcaaagaagtggaaaaataccagaacccgcgcggcggctacttcacgccgggaagctataccgtttctgctcacgtcccgttgggaagcgtggttggcgcgacgccagacggtcgttttgccggagaacagctggcagacggcggcttgagtcccatgctgggccaggacgcacaagggccaacagcggtactgaagagtgtcagtaagctcgataacacgctgctgtctaacggtacgttgctgaacgtgaaattcactccggcgaccctggaaggtgaagcaggattacgcaaactggccgacttcttacgggcgtttacccagcttaagttacaacatattcagtttaacgtggtgaacgccgacacgttgcgggaagcgcaacagcgcccacaagattatgccgggctggtggtgcgcgttgccggatacagcgccttctttgtcgaactgagcaaggagatccaggatgacatcatccgccggacagcgcatcagctgtaattaaactgtcgaaggagatccaggatgacaagttccgccggacagcgcatcagctgtaacgttgtggaaacgcgccgcgatgatgtggcgcgcattttcaacattcagcgttatagtctgaatgacggcgagggcattcgtacggtggtcttttttaaaggctgtccgcatctttgcccgtggtgtgctaatccggagagcatctccggcaaaatccagacggtacgcagagaggcgaaatgtctgcactgtgcgaaatgtttgcgtgatgcggatgaatgcccctccggggcgtttgaacggattggtcgcgatatcagccttgacgctctggaacgggaagtgatgaaagatgacattttctttcgcacgtccggcggcggcgtcacgctttctggcggcgaagtgttaatgcaggcggagtttgctacccgttttttacagcgactgcggctgtggggtgtgagttgcgccattgaaactgccggagacgcaccagccagcaagctattaccgctggcgaaattgtgcgatgaagtgttgttcgatttaaaaattatggacgcgactcaggcgcgggatgtggtgaagatgaacctgccacgcgtgctggagaatctgcgtttgctggtgagtgagggcgtcaacgtgatcccgcgtttaccgctgatccctggtttcacgctcagccgggagaatatgcagcaggcgctggatgtactgatcccgctgaatatcaggcagatccatctgttaccgtttcatcagtacggcgaaccgaaataccgcctgctggggaaaacatggagcatgaaagaggtgcctgcgccgagcagtgctgatgtggcaacgatgcgcgaaatggcagaacgggccggacttcaggttaccgtgggaggttaaaatggcatacctggtggcagtaaccgcctgcgtaagcggcgtggcgcatacttatatggcggcggaacggctggaaaagttgtgcctgttagagaagtggggagtcagcattgaaactcagggcgcgctgggaacggagaatcgtttagcggatgaggatatccgccgggcggatgttgctctgttgattacggatatcgagcttgccggtgccgagcgatttgaacattgccgctatgtgcaatgcagcatctacgcattcctgcgtgagccgcagcgggtaatgagcgcggtgcgcaaagtgctttctgcgccgcagcaaacccatcttattctggagtaattattctggagtagtcggtttttctgtcagttggctgtggtactgccggcgatattcgctcgggctgcgttcggtgtttttacgaaacagacggcagaagtagttgctgtcgacaaagccgcaggcgtgcgccacttcttttaccttcaggtcatagcctttcaataacgtcttagcgtgctccagtcgcgtgtgattcaggtattcgttaaaaccaatggcccccgttttttgaaacaggtggctgaggtaatttgggctaatataaaacgcctgtgcaacagattcgcgggtaagcgcggaggcatagcgttcgtcgatataatcgcgaatagcttcaaatagtgcctggctgcgactggcggtctggatttggctgccaagcaaatcgcggcagtggctaagcaggctggcgacgataagccttgccgtttgctgctcctgcggctgcatttgcatttcattgagcgtttgtagcagaaaagaacctatgcgtgggccgcgtcgggcgacgtgttgcttcgccagattttgatattgtttgccatcccattgcacgacgctgaagccgagttgctgtttgccaaacagcacgctaaaggtagtagcgggggcttgccattgtggaaaattccagccaccagcaggaacgtacagcacatcgccgggaactaacgttgctccagcgccggtatcaacaaactcaccttccagcacaatttccagccgtggaaaatcgacctgatacgcaagatcgggcaccgggccgttactgctggcaaagtaaatctggcgcagggacagcgggccgttgatcaggcgggagagcagatagctgacgtcgtgatacatgttattcccttaggtatgtagacgggaaaacagtaactggcattattaaaaaaggccacctgaaaagtgtggcctgaggggagttcgatgtaaacattgcggcagttgtattgccggatgtggcgtaaacgccttatccagcctaccgccgcgatctgtaggccggataagacgcgtcaagcgtcgcatccggcaaatagcgcctggctgataattactgattacccacctgatcgccatagggcagtgtgtcgtaatcgatcagtgcgtttttcttatacgggttaccaatccagcgggtagtttctttgaactgcggattcaccacactacgggttggatcgtaaccgtcgtaagataagcccgccaaatcactccaggtgtggatcagttccgccaggctgtatttacgatcaacatcctggctgaaatcacggggatgagtcgcttgccatttttcactcgtccacagcaggaacggaatggtgtacatatgacgcgtcgggttgtcctcattacgcccctgagttttgtgcggcggcgtgtcgtaaacctcttcaccgtggtcagagaaataaaccaggaaaccgttcgggtttgctgctttaaagtctttaatcaggctggcaaccacatgatcgttatacaggttagcgttgtcataatcgttataactctccagctcttccgcgtttaatcccggcggaacatgatcggtattgccatcaaacttgccctgattttccgggtagcggtatttgtatttgatatgcgtacccagcagatgaacaatgatcagtttcttcggcgcagggtcattcagcacttcctggaacggcttcagcacgttggtgtcgtattcacgcgcactctgcgtacgttgctggttcatgtagtactgcttgtcggtctggcggctaaataccgtcagcatggtattgcgggcggtcatcgtctgctggttggtgatccagaaggttttataacccgcctgtttcatcatgttcatcaggctcggctgcgtcagatacagatccgggttcttttcattggcaaaggtcagcgcctgttgcaggatttcaatggtgtacggacgagacgtaactacgttattaaacacggtcagattcggatcggttttatgcagcgcatccagctccggcgtggtttcacgcggataaccgtacagactcatgcgtccgcgctgggtgctctcgccaatcaccagcactaaagtgcgcggttcgttaccgctttcatctttgaaattagccagtggcggcaaggcattattttcattcagtaactttgttaggctgtttagttgctgacgatactgataatagccggtcaggaattgccacggtgcggcaggctccatacggctggccaggttatccaacgttttctcaaacggcttgtttttgataaacgtattcatggcgatcggatgcagaatcaagccataaagcagggcaaaagagacaacataacgccacggctttggaatatagaccgggcgcaggcgtgtccacagcagaactgccaccgccgtataggccagcgcgataagcacaattttcaggctgaaatactggcttaaatactcgctggcttcgttggtgttggtttcgaacatcacaaacagaacgctctggctgaactcctgaccgtagatgacgtagtagcacagcgccgccagagaggccgcccatagcaccacgccgattactgcggcaataattttaatccgcttcggaaagaggaataccgggatcaaccacaggctactgaataacaggctgtcgcgaatgccgttagtgccactataaccactgatgtaaataatggcctgtagcagagtagagaaaaaccaaaagtagagcagtgcccaacccagggctttccagctaaaaagaggtttagcctggacttctgtggaatgcatagtaagaacctgtcttgaaaaaatatcgccgaatgtaacgacaattccttaaggatatctgaaggtatattcagaatttgaataaaatgcagacagaaatatattgaaaacgagggtgttagaacagaagtatttcagaaaaccctcgcgcaaaagcacgagggtttgcagaagaggaagattagccggtattacgcatacctgccgcaatcccggcaatagtgaccattaacgcttgttcgacgcgaggatccggttcctggccttctttttctgcctggcgggagcggtgcagcaactcggcctgcaatacgttcagcgggtcggtgtaaatattccgtagctgaatagactctgcaatccacggcagatcggccatcagatgggaatcgttggcaatcgccagcaccactttgatgtcttcttcttgcaggttgcgtaactctttacctaacggccacagtgctttgtctaccaggcgttggtcatagtattccgccagccacaggtctgctttggcgaagaccatctccagcatgccgagacgcgtgctgaagaatggccaatcgcggcacatagcctccagctcgctctgtttgccgtcttcgaccactttttgcagcgccgtacctgcacccagccaggcggggagcatcagacggttttgcgtccaggcgaagatccacggaatggcgcgtagactctcgacgccgccggttgggcgacgtttcgccggacgactacccaacggcagtttgcccagttcttgttccggcgtagcggagcggaagtaaggcacaaaatctttgttttcacgtacgtagccgcggtagacatcgcaggagatgacactcagttcatccataatgcgacgccagctctctttcggctccggcggtggcagcaggttggcttccagaatcgccccggtataaaggctcaggctgctgacggtgatttctggcagaccatatttaaagcggatcatctcgccctgttcggttacgcgcaggccgcctttcaggcttcctggcggttgactcagcagcgccgcatgagcaggtgcgccgccgcgaccaatggaaccgccgcgaccgtggaacaacgtcagctcaatacccgctttttcgcaggttttgattaatgcatcctgtgcctgatattgcgcccaggaagctgccatcactcccgcatcttttgcactgtcggaatagccaatcatcaccatctgtttgccctgaatcaggccacgataccagtcaatattgagcagctgggtcatgacatcgttggcgttgttcagatcatcgagggtttcaaacagcggagcaaccggcatcgcaaacccgatacccgcttctttcagcagcaggtggacagccagtacgtcggacggcgttttcgccatgctgatcacgtaggcggcaatggagccttgcggtgcttcggcaatcacctggcaggtatcgagcacttcgcgcgtttcggcgcttggttgccagttgcgcggcagaagcggacgtttggagttcagttcgcggatcaggaacgcctgtttgtcggcctcactccagctttcgtagtcgccgataccgaggtagcgggtcagctcgcccagcgcttcggtatgacgcgtgctctcctgacggatatcaatacggaccagcggtacgccgaaacatttcacgcggcgcagggtgtcgagcagatcgccgttggcgataatacccatgccacacgcctgaagactctggtagcaagcgtagagcggttcccacagttcttcgttttgtgtcagcaggccttctggttttggcagttcttcgcctttcaggcgcgcttccagccatgcctgtgtcgccatcaggcgagaacgcaggtttttcatcagatagcgatacggttctgcggcaccttcttcgccaaccagcgccagcagttcaggggtcgcttcaaccatgctcagttcagaaaccagcacctgaatatctttcaggaacaaatcggtggctttccagcggctgagtagcaggacgtggcgggtgatatcggcagtgacgttcgggttgccgtcgcggtcgccgcccatccagctagtaaaacggaccggaacaaattcgacgggcagtttgtagccgaggttctcttccagttgttcgttcagttcgcgcaggtaatttggtacgccttgccacaggctgttttccactacggcaaagccccatttggcttcatctaccgggcttggacgcagcttacggatttcatcggtatgccaactctgggcgatcaactggcgcaggcgacgcatcagctggttgtgttcgtagtcagcgatatctttgttatcgagctgttttaaacaggcgttcacttccaccattttgtggatcagtgtacgacgggtaatttcggttgggtgagccgtgaggaccagttccaggctcaggctttccactgcttttttgatggtgtcttcgctcagttccggctggtttttcagtttacgcagggtgcgggcgatcacttccgggttgctggcagcttcgcctttcgggctaatgctgtggtattgctcggcggtgttggccaggttcaggaactgactaaacgcacgcgcaacgggcagcagctcgtcgttgctcaaattttgtaaggtggtgagcaactcctggcggttagcatcattgccagcgcgactagatttgctcaacttacggatagtttctacgcgttcaagaatgtgttctcccaacgcatccttgatggtttctcccagcactttgccgagcatactgacattactacgcaatgcggaatattgttcgttcatattaccccagacaccccatcttatcgtttgatagccctgtatccttcacgtcgcattggcgcgaatatgctcgggctttgcttttcgtcgtcttttataaagccacgtaaaagcggtgacgtcaaatgctgcgaaatcgcttcagcaaacgaataaatagcaggaatttacgtcattaaattcacgacgctttaaataagcgtaacttatggaaatgttaaaaaatcgccccaagtaacaccaaaggtgtaggtcggataagatgcgcaagtatcgcatccgacattattgcggcactggagtttggcaacagtgccggatgcggcgcgagcgccttatccggcctacagttgggcatcgtttgagtcactgtcggtcggataagatgcgcaagtatcgcatccgacattattgcggcactggagtttggcaacagtgccggatgcggcgcgagcgccttatccggcctacggttgggcatcgtttgagtcactgtaggtcggataagatgcgcaagcatcgcatccgacattattgcggcactggagtttggcaacagcgccggatgcggcgcgagcgccttatccggcctacgttttaatgccagcaaaaatggtgaattacctgggttatcagttcgcgggtgggcttgataaaccgtgtttccagatattcatcaggttgatgagcctgattaatactgccaggccccaacaccagcgtcgggcataacgtttgaataaacggcgcttcggtacagtagttcaccacttcggtttttgctccgagcaatttctcaaccacttcaaccagttgatgattcggtgggcattcatagccagggatcggcggatgcagctcgtcgaccgtcagacgacccggccagcgttcgctcaccggagccaatgcatcgttgagcaaaccattaagttcattgagtgtcatgccaggcagcggacgaatatccatatgcaactcacagcaagcgcaaatacggttagaagcgtcgccaccgtgaatatgcccgaggttgagcgtagggtatggcacggtaaacgcttcgtagtgataacgttctttcaggttatcgcgcaattgcaaaatatgcccgatggcgtcgtgcattagttcgatagcgttaactccgcgtgctggatcgctggagtgcccgctctggccctgaatacggatggcgttagagatatgacctttatgtgcgcgtaccggttgtagactcgtcggttcgccaatgatggcgcaatccgggcgcagggcggtagtttcggcaaaataacgcgctccggccatactggtttcttcatcagcagtcgccagaatgtagagcggttttttcagtttcgtgacgtcgacatcgcgtagcgcatcaaggataaacgcaaaaaagcctttcatgtcggcggtgcctaagccgtaaagcttgccgtcatgctccgtcagtgtaaacggatcgcgcgtccagcgaccgtcatcaaatggcaccgtatcggtatgccccgccagcaacaagccgccagccccctgtccgatacttgccagcatattgaatttgttgcgagttcctggaacaggctgcacttccacattgaagcccaaatctttaaaccagtccgccagcagagtgattaaatctgcattgctttgatcgagtgcctcttccgtggcgcttatactaggtgtggcaatcagagcgcggtaaatctcgataaatggcggtaatttgtttttcattgttgacacacctctggtcatgatagtatcaatattcatgcagtatttatgaataaaaatacactaacgttgagcgtaataaaacccaccagccgtaaggtgaatgttttacgtttaacctggcaaccagacataagaaggtgaatagccccgatgttgaatacgctgattgtgggtgccagcggctacgctggcgcagagctagtgacctatgtaaatcgccatccgcatatgaacataaccgctttgactgttagtgcgcaaagcaatgatgcgggaaagttaatctccgatttgcatccgcagctaaaaggcatcgttgatctgccgttgcagccgatgagcgatatcagcgagtttagcccaggggtggacgtagtgtttctcgccaccgcccatgaagttagccacgatttagcgccgcagtttcttgaagcgggctgcgtggtgttcgacctttccggcgcgtttcgtgttaacgacgccaccttctatgaaaaatattacggctttacccatcaatacccggaactgttggaacaggcagcctacggtctggcggagtggtgcggtaataaattaaaagaagcgaatttgattgcggtgccgggctgttatccgacggcggcacagctggcgctgaaaccgttgattgatgccgatcttcttgacctcaatcagtggccggtgatcaacgccaccagcggcgtgagcggtgcagggcgtaaagcggccattagtaacagcttttgtgaagttagcctgcaaccgtatggcgtctttactcatcgccatcaaccagagatcgccacacacctcggtgctgacgttatcttcaccccacatctgggcaatttcccgcgcggcattctcgaaaccattacctgccgcctgaaaagcggtgtgacccaggcgcaagtcgcgcaagtgttacagcaggcgtatgcccataaaccgctggtgcggctgtatgacaaaggcgttccggcgctgaaaaatgtcgttgggctgccattttgcgatatcgggtttgccgttcagggcgagcatctgattattgtggcgaccgaagacaacttactgaaaggcgcggcggcacaagcggtacagtgcgccaatattcgtttcggctatgcggaaacgcagtctcttatttaagggtgcaatgatgaatccattaattatcaaactgggcggcgtactgctggatagtgaagaggcgctggaacgtctgtttagcgcactggtgaattatcgtgagagtcatcagcgtccgctggtgattgtgcacggcggcggttgcgtggtggatgagctgatgaaagggctgaatctgccggtgaaaaagaaaaacggcctgcgggtgacgcctgctgatcagatagacattatcaccggagcactggcgggaacggcaaataaaaccctgttggcatgggcgaagaaacatcagattgcggccgtaggtttgtttctcggtgacggcgacagcgtcaaagtgacccagcttgatgaagagttaggtcatgttggactggcgcagccaggtagccctaagcttatcaactccttgctggagaacggttatctgccggtggtcagctccattggcgtaacagacgaagggcaactgatgaacgtcaatgccgaccaggcggcaacggcgctggcggcaacgctgggcgcggatctgattttgctctccgacgtcagcggcattctcgacggcaaagggcaacgcattgccgaaatgaccgccgcgaaagcagaacaactgattgagcagggcattattactgacggcatgatagtgaaagtgaacgcggcgctggatgcggcccgcacgctgggccgtccggtagatatcgcctcctggcgtcatgcggagcagcttccggcactgtttaacggtatgccgatgggtacgcggattttagcttaagttttgttggccggaggcgcagctttccggcattgaatttcaaaataaggaaacagagttatggcactttggggcgggcgttttacccaggcagcagatcaacggttcaaacaattcaacgacagtctgcgctttgattaccgtctggcggagcaggatattgttggctctgtggcctggtccaaagccctggtcacggtaggcgtgttaaccgcagaagagcaggcgcaactggaagaggcgctgaacgtgttgctggaagatgttcgcgccaggccacaacaaatccttgaaagcgacgccgaagatatccatagctgggtggaaggcaaactgatcgacaaagtgggccagttaggcaaaaagctgcataccgggcgtagccgtaatgatcaggtagcgactgacctgaaactgtggtgcaaagataccgttagcgagttactgacggctaaccggcagctgcaaagcgcgctggtggaaaccgcacaaaacaatcaggacgcggtaatgccaggttacactcacctgcaacgcgcccagccggtgacgttcgcgcactggtgcctggcctatgttgagatgctggcgcgtgatgaaagccgtttgcaggatgcgcttaagcgtctggatgtcagcccgctaggctgtggcgcgctggcgggaacggcctatgaaatcgaccgtgaacagttagcaggctggctgggctttgctagcgcgacccgtaacagtctcgacagcgtttctgaccgtgaccatgtgttggaactgctttctgctgccgctatcggcatggtgcatctgagccgttttgctgaagatctgattttctttaacaccggcgaagcggggtttgtggagctttctgaccgcgtgacttccggtagtagtttaatgccgcagaagaaaaacccggatgcgctggagctgattcgcggtaaatgcggccgggtgcagggggcgttaaccggcatgatgatgacgctgaaaggtttgccgctggcttacaacaaagatatgcaggaagacaaagaaggtctgttcgacgcgctcgatacctggctggactgcctgcatatggcggcgctggtgctggacggcattcaggtgaaacgtccacgttgccaggaagcggctcagcagggttacgccaacgccaccgaactggcggattatctggtggcgaaaggcgtaccgttccgcgaggcgcaccatattgttggtgaagcggtggtggaagccattcgtcagggcaaaccgctggaagatctgccgctcagtgagttgcagaaattcagtcaggtgattgacgaagatgtctatccgattctgagcctgcaaagctgcctcgacaagcgtgcggcaaaaggcggcgtcagtccgcagcaggtggcgcaggcgattgcttttgcgcaggctcggttagggtaagaacatttatatgtataaatttgagcctggcttatcgccgggcttttttatggcaaaaaaaagcggatcctggagatccgcaaaagttcacgttggctttagttattcgagttgagaaactctcgaaacgggcagtgacttcaagggttaaaagaggtgccgctccgtttctgtgagcaattatcagtcagaatgcttgatagggataatcgttcattgctattctacctatcgccatgaactatcgtggcgatggaggatggataatgaatattcgtgatcttgagtacctggtggcattggctgaacaccgccattttcggcgtgcggcagattcctgccacgttagccagccgacgcttagcgggcaaattcgtaagctggaagatgagctgggcgtgatgttgctggagcggaccagccgtaaagtgttgttcacccaggcgggaatgctgctggtggatcaggcgcgtaccgtgctgcgtgaggtgaaagtccttaaagagatggcaagccagcagggcgagacgatgtccggaccgctgcacattggtttgattcccacagttggaccgtacctgctaccgcatattatccctatgctgcaccagacctttccaaagctggaaatgtatctgcatgaagcacagacccaccagttactggcgcaactggacagcggcaaactcgattgcgtgatcctcgcgctggtgaaagagagcgaagcattcattgaagtgccgttgtttgatgagccaatgttgctggctatctatgaagatcacccgtgggcgaaccgcgaatgcgtaccgatggccgatctggcaggggaaaaactgctgatgctggaagatggtcactgtttgcgcgatcaggcaatgggtttctgttttgaagccggggcggatgaagatacacacttccgcgcgaccagcctggaaactctgcgcaacatggtggcggcaggtagcgggatcactttactgccagcgctggctgtgccgccggagcgcaaacgcgatggggttgtttatctgccgtgcattaagccggaaccacgccgcactattggcctggtttatcgtcctggcagtccgctgcgcagccgctatgagcagctggcagaggccatccgcgcaagaatggatggccatttcgataaagttttaaaacaggcggtttaaaccgtttaacgcagctacccgataggcttccgccatcgtcgggtagttaaaggtggtgttgacgaagtactcaatagtgttgccgccacctttctgttccataatcgcctgaccgatatgaataatttcggcagcgcgctcgccaaagcagtgaatacccagaatctcttttgtttcccgatggaacaaaattttcagcgtgcccacgttcatgccgacgatttgtgcgcgtgccagatgtttaaactgggcgcggcccacttcatatggcactttcattgcggtcagctgctgttcggttttgcccacagagctgatttccgggatggtgtaaataccggtagggatatcttcaatcagatgtgcggtggcttcgccttttaccagcgcctgcgcggcaatgcgcccctggtcataggccgcgctcgccaggctcggataaccaatcacgtcgcccaccgcgtaaacgtgtggctgtgcggtctgatacatgctgttgaccttcagctgtccgcggctgtcagtttctagcccaatgttctgtaacgccaggctatcggtattaccggtgcgaccgttggcatagagcaggcagtcagctttcagttttttaccgctcttcagatgcatgatcacaccatcgtcacagccttcgatcttctcgtactcttcgttgtgacgaatcactacgccactgttccagaagtgataggagagagaatcactcatctcttgatcgagaaatgccagcaggcgatcgcgggtgttgatcagatccacttttacatccataccgcggaagatgctcgcatattcacagccgatcactccagcaccatagataagtacatggcgcggttcgtggtgcatgctgagaatactgtcgctgtcgtaaatgcgtggatgggtgaaatcaacatctgttggatgatatggacgagagccgcaggcaataacaaatttttcagcggttagtgtttcaacgctgccgtccgggcaatccagcgccaacgtatgctcgtcaacaaagcgagcgtttccctgcaatatttcacagtgattacgttcgtaaaatccctgacgcatgcgcgtttgttgattaatcacgttatcggcatggttaaggatatcggcaaaagaagagcggagcagtcgggaatggtcgctgtaaagtgggttttgattgaattctataatgcggctgacggcgtgacggagagctttgctcgggatggtgccccagtgggtgcaaccgccgccaacattttgataacgctcgataactgcgacgcgcgcaccttgcttaaccaggcccattgcagcgccttcgccgccggggccggaacctattactatggcatcgtaatcgtaggaatgtggcatggtagggcttacctgttcttatacataaaagcaacagaatggtaacattttatcgcgggtaagccaattgatccccgtcatttatctggctatatcctgagcggcctttgctttgtctgtttcttacttttgccctgacgttttattggatttttatcgacgatactctccgtttaagcggcaggtttccgctgtacgtaaaagaaccggccaaagaattgcagtaaatatgttttattgcgttaccgttcattcacaatactggagcaatccagtatgttcattctctggtatagtgccagcagtacttttggcaaggatagtgacatcgtgatgggcgtaagagcgcaacaaaaagaaaaaacccgccgtagcctggtggaagccgcatttagccaattaagtgctgaacgcagcttcgccagcctgagtttgcgtgaagtggcgcgtgaagcgggcattgctcccacctctttttatcggcatttccgcgacgtagacgaactgggtctgaccatggttgatgagagcggtttaatgctacgccaactcatgcgccaggcgcgtcagcgtatcgccaaaggcgggagtgtgatccgcaccagcgtctccacatttatggagttcatcggtaataatcctaacgccttccggttattattgcgggaacgctccggcacctccgctgcgtttcgtgccgccgttgcgcgtgaaattcagcacttcattgcggaacttgcggactatctggaactcgaaaaccatatgccgcgtgcgtttactgaagcgcaagccgaagcaatggtgacaattgtcttcagtgcgggtgccgaggcgttggacgtcggcgtcgaacaacgtcggcaattagaagagcgactggtactgcaactgcgaatgattagcaaaggggcttattactggtatcgccgtgaacaagagaaaaccgcaattattccgggaaatgtgaaggacgagtaatgaaacaagcaaatcaagatagaggtacgctgctgctggcgttagttgctggcttaagcattaatggtactttcgcagcgctgtttagctccattgtgccattttctgtattcccgattatttccctggtgctgacggtttactgcctgcatcaacgttatcttaatcgcactatgccggtaggcttgccgggtctggcagctgcctgttttattctcggcgtactgctgtacagcacggtagttcgtgcggaatatccggatatcggctctaacttcttcccggcagtactctccgtcattatggtgttctggattggcgcgaagatgcgtaaccgtaagcaggaagttgctgagtaatcggtattatgccggatgctggcgcatccggcatgggttttacttcgcggtcagtaatacgccgcactccatatggtgcgtgtaggggaactgatcaaacagagccagacgttcgaccttgtgcgtctggcttaatgtttccagattcttgcataacgtttccgggttacaggagatgtacaaaatacgcggatacgcctgcaccattttctcggtttcactgtccagaccgctgcgcggagggtcgacaaaaatggtttcgcactgataactctttaagtcgatcccttgcaggcggttaaactcgcgcacaccattcatcgcctgagtaaattcttctgccgccatacgaataatttgtacgttatcaatatggttagctgcgatgttgtattgcgcagcagcaacgctcggcttagcgatttcggtggctaatacccgatcaaaattacgcgccagcgctaaactaaagttaccgttgccgcagtacagctccagtaaatcgcctttactgcctttggttacgtccagcgcccattccagcatctgaatattcatcgccgcgttcggctgggtaaagctgttttctacctgacggtagatcatctctttccctgcgaccggcagacgttcatcgatgtaatcctgatccagctcgattttggttttcgttgcccgaccaatcagatgcacattcagattctgcgcgcgcagtgcatcgcgcagggcctccgcttcctgacgccactcatcatccagcttcttatggtatagcagggaaaccaccgcctgattactcagtgtagtgaggtaatcaatctggaacaacttgtggcgcagaacgggattattacgcacacccgcaatcatcgccgtcatcaactggttgataagttcactggcggcggggaagctatccacgcggatgcggcttttggtttgttgatcgaaaatgatgtgatacaggtcatcgccatcgtgccagatgcggaactccgcgcgcatccggtaatgactgaccgggctgcgaaacacttccggaaccaggtcagaaaacggtgccatcatactttgcaaacgtaccactttttcggctaactgcgcttcatactgttctgttggaaggtgttcgggggtcatgatgtatcctgaaaaattaaagtacgcggcgattgtagggattgctcatcagatgtccagatcttgatgaattcctatttgtgagctacgtctggacagtaacttgttacaacctgtagcatccacttgccggtcctgtgagttaatagggaatccagtgcgaatctggagctgacgcgcagcggtaaggaaaggtgcgatgattgcgttatgcggacactgccattcggtgggaagtcatcatctcttagtatcttagatacccctccaagcccgaagacctgccggccaacgtcgcatctggttctcatcatcgcgtaatattgatgaaacctgcggcatccttcttctattgtggatgctttacaatgattaaaaaagctagcctgctgacggcgtgttccgtcacggcattttccgcttgggcacaggataccagcccggatactctcgtcgttactgctaaccgttttgaacagccgcgcagcactgtgcttgcaccaaccaccgttgtgacccgtcaggatatcgaccgctggcagagcaccagcgtcaatgatgtgctgcgccgtcttccgggcgtcgatatcacccaaaacggcggtagtggtcagctcagttctatttttattcgcggtacaaatgccagtcatgtgttggtgttaattgatggcgtacgcctgaatctggcgggggtgagtggttctgccgaccttagccagttccctattgcgcttgtccagcgtgttgaatatatccgtgggccgcgctccgctgtttatggttccgatgcaataggcggggtggtgaatatcatcacgacgcgcgatgaacccggaacggaaattagtgcagggtggggaagcaatagttatcagaactatgatgtctctacgcagcaacaactgggggataagacacgggtaacgctgttgggcgattatgcccatactcatggttatgatgttgttgcctatggtaataccggaacgcaagcgcagacagataacgatggttttttaagtaaaacgctttatggcgcgctggagcataactttactgatgcctggagcggctttgtgcgcggctatggctatgataaccgtaccaattatgacgcgtattattctcccggtagtccgttgctcgatacccgtaaactctatagccaaagttgggacgccgggctgcgctataacggcgaactgattaaaagtcaactcattaccagctatagccatagcaaagattacaactacgatccccattatggtcgttatgatagcagcgcgacgctcgatgagatgaagcaatacaccgtccagtgggcaaacaatgtcatcgttggtcacggtagtattggtgcgggtgtcgactggcagaaacagactacgacgccgggtacaggttatgttgaggatggatatgatcaacgtaataccggcatctatctgaccgggctgcaacaagtcggcgattttacctttgaaggcgcagcacgcagtgacgataacagtcagtttggtcgtcatggaacctggcaaaccagcgccggttgggaattcatcgaaggttatcgcttcattgcttcctacgggacatcttataaggcaccaaatctggggcaactgtatggcttctacggaaatccgaatctggacccggagaaaagcaaacagtgggaaggcgcgtttgaaggcttaaccgctggggtgaactggcgtatttccggatatcgtaacgatgtcagtgacttgatcgattatgatgatcacaccctgaaatattacaacgaagggaaagcgcggattaagggcgtcgaggcgaccgccaattttgataccggaccactgacgcatactgtgagttatgattatgtcgatgcgcgcaatgcgattaccgacacgccgttgttacgccgtgctaaacagcaggtgaaataccagctcgactggcagttgtatgacttcgactggggtattacttatcagtatttaggcactcgctatgataaggattacagttcttatccttatcaaaccgttaaaatgggcggtgtgagcttgtgggatcttgcggttgcgtatccggtcacctctcacctgacagttcgtggtaaaatagccaacctgttcgacaaagattatgagacagtctatggctaccaaactgcaggacgggaatacaccttgtctggcagctacaccttctgaaccacgtcccaccgtgctggtgtttgactccggcgtcggtgggttgagcgtctatgacgagatccggcatctcttaccggatctccattacatttatgctttcgataacgtcgctttcccgtatggcgaaaaaagcgaagcgtttattgttgagcgagtggtggcaattgtcaccgcggtgcaagaacgttatccccttgcgctggctgtggtcgcttgcaacactgccagtaccgttagtcttcctgcattacgcgaaaagttcgacttcccggttgttggtgtcgtgccggcgattaaacctgctgcacgtctgacggcaaatggcattgtcggattactggcaacccgcggaacagttaaacgttcttatactcatgagctgatcgcgcgtttcgctaatgaatgccagatagaaatgctgggcagcgcagagatggttgagttggctgaagcgaagctacatggcgaagatgtttctctggatgcactaaaacgtatcctacgcccgtggttaagaatgaaagagccgccagataccgttgtattgggttgcacccatttccctctactacaagaagaactgttacaagtgctgccagagggaacccggctggtggattctggcgcagcgattgctcgccgaacggcctggttgttagaacatgaagccccggatgcaaaatctgccgatgcgaatattgccttttgtatggcaatgacgccaggagctgaacaattattgcccgttttacagcgttacggcttcgaaacgctcgaaaaactggcagttttaggctgatttggttgaatgttgcgcggtcagaaaattattttaaatttcctcttgtcaggccggaataactccctataatgcgccaccactgacacggaacaacggcaaacacgccgccgggtcagcggggttctcctgagaactccggcagagaaagcaaaaataaatgcttgactctgtagcgggaaggcgtattatgcacaccccgcgccgctgagaaaaagcgaagcggcactgctctttaacaatttatcagacaatctgtgtgggcactcgaagatacggattcttaacgtcgcaagacgaaaaatgaataccaagtctcaagagtgaacacgtaattcattacgaagtttaattctttgagcgtcaaacttttaaattgaagagtttgatcatggctcagattgaacgctggcggcaggcctaacacatgcaagtcgaacggtaacaggaagaagcttgcttctttgctgacgagtggcggacgggtgagtaatgtctgggaaactgcctgatggagggggataactactggaaacggtagctaataccgcataacgtcgcaagaccaaagagggggaccttcgggcctcttgccatcggatgtgcccagatgggattagctagtaggtggggtaacggctcacctaggcgacgatccctagctggtctgagaggatgaccagccacactggaactgagacacggtccagactcctacgggaggcagcagtggggaatattgcacaatgggcgcaagcctgatgcagccatgccgcgtgtatgaagaaggccttcgggttgtaaagtactttcagcggggaggaagggagtaaagttaatacctttgctcattgacgttacccgcagaagaagcaccggctaactccgtgccagcagccgcggtaatacggagggtgcaagcgttaatcggaattactgggcgtaaagcgcacgcaggcggtttgttaagtcagatgtgaaatccccgggctcaacctgggaactgcatctgatactggcaagcttgagtctcgtagaggggggtagaattccaggtgtagcggtgaaatgcgtagagatctggaggaataccggtggcgaaggcggccccctggacgaagactgacgctcaggtgcgaaagcgtggggagcaaacaggattagataccctggtagtccacgccgtaaacgatgtcgacttggaggttgtgcccttgaggcgtggcttccggagctaacgcgttaagtcgaccgcctggggagtacggccgcaaggttaaaactcaaatgaattgacgggggcccgcacaagcggtggagcatgtggtttaattcgatgcaacgcgaagaaccttacctggtcttgacatccacggaagttttcagagatgagaatgtgccttcgggaaccgtgagacaggtgctgcatggctgtcgtcagctcgtgttgtgaaatgttgggttaagtcccgcaacgagcgcaacccttatcctttgttgccagcggtccggccgggaactcaaaggagactgccagtgataaactggaggaaggtggggatgacgtcaagtcatcatggcccttacgaccagggctacacacgtgctacaatggcgcatacaaagagaagcgacctcgcgagagcaagcggacctcataaagtgcgtcgtagtccggattggagtctgcaactcgactccatgaagtcggaatcgctagtaatcgtggatcagaatgccacggtgaatacgttcccgggccttgtacacaccgcccgtcacaccatgggagtgggttgcaaaagaagtaggtagcttaaccttcgggagggcgcttaccactttgtgattcatgactggggtgaagtcgtaacaaggtaaccgtaggggaacctgcggttggatcacctccttaccttaaagaagcgtactttgtagtgctcacacagattgtctgatagaaagtgaaaagcaaggcgtttacgcgttgggagtgaggctgaagagaataaggccgttcgctttctattaatgaaagctcaccctacacgaaaatatcacgcaacgcgtgataagcaattttcgtgtccccttcgtctagaggcccaggacaccgccctttcacggcggtaacaggggttcgaatcccctaggggacgccacttgctggtttgtgagtgaaagtcgccgaccttaatatctcaaaactcatcttcgggtgatgtttgagatatttgctctttaaaaatctggatcaagctgaaaattgaaacactgaacaacgagagttgttcgtgagtctctcaaattttcgcaacacgatgatgaatcgaaagaaacatcttcgggttgtgaggttaagcgactaagcgtacacggtggatgccctggcagtcagaggcgatgaaggacgtgctaatctgcgataagcgtcggtaaggtgatatgaaccgttataaccggcgatttccgaatggggaaacccagtgtgtttcgacacactatcattaactgaatccataggttaatgaggcgaaccgggggaactgaaacatctaagtaccccgaggaaaagaaatcaaccgagattcccccagtagcggcgagcgaacggggagcagcccagagcctgaatcagtgtgtgtgttagtggaagcgtctggaaaggcgcgcgatacagggtgacagccccgtacacaaaaatgcacatgctgtgagctcgatgagtagggcgggacacgtggtatcctgtctgaatatggggggaccatcctccaaggctaaatactcctgactgaccgatagtgaaccagtaccgtgagggaaaggcgaaaagaaccccggcgaggggagtgaaaaagaacctgaaaccgtgtacgtacaagcagtgggagcacgcttaggcgtgtgactgcgtaccttttgtataatgggtcagcgacttatattctgtagcaaggttaaccgaataggggagccgaagggaaaccgagtcttaactgggcgttaagttgcagggtatagacccgaaacccggtgatctagccatgggcaggttgaaggttgggtaacactaactggaggaccgaaccgactaatgttgaaaaattagcggatgacttgtggctgggggtgaaaggccaatcaaaccgggagatagctggttctccccgaaagctatttaggtagcgcctcgtgaattcatctccgggggtagagcactgtttcggcaagggggtcatcccgacttaccaacccgatgcaaactgcgaataccggagaatgttatcacgggagacacacggcgggtgctaacgtccgtcgtgaagagggaaacaacccagaccgccagctaaggtcccaaagtcatggttaagtgggaaacgatgtgggaaggcccagacagccaggatgttggcttagaagcagccatcatttaaagaaagcgtaatagctcactggtcgagtcggcctgcgcggaagatgtaacggggctaaaccatgcaccgaagctgcggcagcgacgcttatgcgttgttgggtaggggagcgttctgtaagcctgcgaaggtgtgctgtgaggcatgctggaggtatcagaagtgcgaatgctgacataagtaacgataaagcgggtgaaaagcccgctcgccggaagaccaagggttcctgtccaacgttaatcggggcagggtgagtcgacccctaaggcgaggccgaaaggcgtagtcgatgggaaacaggttaatattcctgtacttggtgttactgcgaaggggggacggagaaggctatgttggccgggcgacggttgtcccggtttaagcgtgtaggctggttttccaggcaaatccggaaaatcaaggctgaggcgtgatgacgaggcactacggtgctgaagcaacaaatgccctgcttccaggaaaagcctctaagcatcaggtaacatcaaatcgtaccccaaaccgacacaggtggtcaggtagagaataccaaggcgcttgagagaactcgggtgaaggaactaggcaaaatggtgccgtaacttcgggagaaggcacgctgatatgtaggtgaggtccctcgcggatggagctgaaatcagtcgaagataccagctggctgcaactgtttattaaaaacacagcactgtgcaaacacgaaagtggacgtatacggtgtgacgcctgcccggtgccggaaggttaattgatggggttagcgcaagcgaagctcttgatcgaagccccggtaaacggcggccgtaactataacggtcctaaggtagcgaaattccttgtcgggtaagttccgacctgcacgaatggcgtaatgatggccaggctgtctccacccgagactcagtgaaattgaactcgctgtgaagatgcagtgtacccgcggcaagacggaaagaccccgtgaacctttactatagcttgacactgaacattgagccttgatgtgtaggataggtgggaggctttgaagtgtggacgccagtctgcatggagccgaccttgaaataccaccctttaatgtttgatgttctaacgttgacccgtaatccgggttgcggacagtgtctggtgggtagtttgactggggcggtctcctcctaaagagtaacggaggagcacgaaggttggctaatcctggtcggacatcaggaggttagtgcaatggcataagccagcttgactgcgagcgtgacggcgcgagcaggtgcgaaagcaggtcatagtgatccggtggttctgaatggaagggccatcgctcaacggataaaaggtactccggggataacaggctgataccgcccaagagttcatatcgacggcggtgtttggcacctcgatgtcggctcatcacatcctggggctgaagtaggtcccaagggtatggctgttcgccatttaaagtggtacgcgagctgggtttagaacgtcgtgagacagttcggtccctatctgccgtgggcgctggagaactgaggggggctgctcctagtacgagaggaccggagtggacgcatcactggtgttcgggttgtcatgccaatggcactgcccggtagctaaatgcggaagagataagtgctgaaagcatctaagcacgaaacttgccccgagatgagttctccctgaccctttaagggtcctgaaggaacgttgaagacgacgacgttgataggccgggtgtgtaagcgcagcgatgcgttgagctaaccggtactaatgaaccgtgaggcttaaccttacaacgccgaagctgttttggcggatgagagaagattttcagcctgatacagattaaatcagaacgcagaagcggtctgataaaacagaatttgcctggcggcagtagcgcggtggtcccacctgaccccatgccgaactcagaagtgaaacgccgtagcgccgatggtagtgtggggtctccccatgcgagagtagggaactgccaggcatcaaataaaacgaaaggctcagtcgaaagactgggcctttcgttttatctgttgtttgtcggtgaacgctctcctgagtaggacaaatccgccgggagcggatttgaacgttgcgaagcaacggcccggagggtggcgggcaggacgcccgccataaactgccaggcatcaaattaagcagaaggccatcctgacggatggcctttttgcgtttctacaaactcttcctgtcgtcatatctacaagccatccccccacagatacggtaaactagcctcgtttttgcatcaggaaagcagctatgaaccactccttaaaaccctggaacacatttggcattgatcataatgctcagcacattgtatgtgccgaagacgaacaacaattactcaatgcctggcagtatgcaaccgcagaaggacaacccgttcttattctgggtgaaggaagtaatgtactttttctggaggactatcgcggcacggtgatcatcaaccggatcaaaggtatcgaaattcatgatgaacctgatgcgtggtatttacatgtaggagccggagaaaactggcatcgtctggtaaaatacactttgcaggaaggtatgcctggtctggaaaatctggcattaattcctggttgtgtcggcagtagtcctatccagaatattggtgcttatggcgtagaattacagcgagtttgcgcttatgttgattctgttgaactggcgacaggcaagcaagtgcgcttaactgccaaagagtgccgttttggctatcgcgacagtatttttaaacatgaataccaggaccgcttcgctattgtagccgtaggtctgcgtctgccaaaagagtggcaacctgtactaacgtatggtgacttaactcgtctggatcctacaacagtaacgccacagcaagtatttaatgcggtgtgtcatatgcgcaccaccaaactccctgatccaaaagtgaatggcaatgccggtagtttcttcaaaaaccctgttgtatctgccgaaacggctaaagcattactgagtcaatttccaacagcaccaaattacccccaggcggatggtagtgtaaaactggcagcaggttggcttatcgatcagtgccagctaaaagggatgcaaataggtggggctgcggtgcaccgtcaacaggcgttagttctcattaatgaagacaatgcaaaaagcgaagatgttgtacagctggcgcatcatgtaagacagaaagttggtgaaaaatttaatgtctggcttgagcctgaagtccgctttattggtgcaagtggtgaagtgagcgcagtggagacaattagttgaaataaagcgcagtggagacaatttcatgaaggataacaccgtgccactgaaattgattgccctgttagcgaacggtgaatttcactctggcgagcagttgggtgaaacgctgggaatgagccgggcggctattaataaacacattcagacactgcgtgactggggcgttgatgtctttaccgttccgggtaaaggatacagcctgcctgagcctatccagttacttaatgctaaacagatattgggtcagctggatggcggtagtgtagccgtgctgccagtgattgactccacgaatcagtaccttcttgatcgtatcggagagcttaaaagcggcgatgcttgcattgcagaataccagcaggctggccgtggtcgccggggtcggaaatggtttagcccttttggcgcaaacttatatttgagcatgttctggcgtctggaacaaggcccggcggcggcgattggtttaagtctggttatcggtatcgtgatggcggaagtattacgcaagctgggtgcagataaagttcgtgttaaatggcctaatgacctctatctgcaggatcgcaagctggcaggcattctggtggagctgactggcaaaactggcgatgcggcgcaaatagtcattggagccgggatcaacatggcaatgcgccgtgttgaagagagtgtcgttaatcaggggtggatcacgctgcaggaagcggggatcaatctcgatcgtaatacgttggcggccatgctaatacgtgaattacgtgctgcgttggaactcttcgaacaagaaggattggcaccttatctgagccgctgggaaaagctggataattttattaatcgcccagtgaaacttatcattggtgataaagaaatatttggcattagtcgcggaatagacaaacagggggctttattacttgagcaggatggaataataaaaccctggatgggcggtgaaatatccctgcgtagtgcagaaaaataagaaaggggagtattcgctcccctgcaaattatttgcgtagtctgacctcttctaccgcatgattagcacttttcgtcaggattaaactggcgcgctcacgagtaggtagaatattttgctttaagttcagccagttgatctctttccacaatgtcatggcagtcttaatcgcttcttctttagttaatttcgcgtagttatgaaaataggaatccgggtcggtaaaagccccttcgcggaatttcagaaaacggttgatataccatgtctgaagtaagtcttccggtgcatcaacatatatgctaaaatcgacaaaatcagaaacaaatacatgatgtggatcgtgtggataatccatcccgctctgtaagacatttaacccttcaagaattaaaatatcaggctgaacaaccgttttatctccatccgggatcacatcataaataagatgactgtaaacaggtgctgtaacgtttggcacgccggatttgagatcggaaacaaacttcaccaggcgatgcatatcatagctttccgggaagcctttcttcttcatcagaccacgttctttcagaacctgattagggtgaaggaagccatctgtagtgatcagttcaacacgacgatgttccggccaacggcttaatagcgcctgcaatacacgggcggttgtacttttccccaccgcgacactgccagcaatactgataatgtaaggaatgcgttgcccgttggtaccaagaaactgttccagaactgcctgacggcgcagattgctgcttatatagaagttcagcaaacgactcaaaggtaaatagatctcggcaacttcttctaagctgagatcttcattaatacctttgagacgggcgatctcatcttcgcttaacgtcataggtacggaatcacgcagagctgcccactggttgcggtcaaactgtaggtaaggcgtcattaacgtttgctcttttatactcataagcatgtttctggcggtcatagctctatcggcaaagcgatatttgccatggcgcgtcacagttctgttgaatgggttaatgggcaggagggtaacaccagatggggaggaataataagaaaaaatctctgccaggaagctatcgttgaaaagcaatgtgacagatattccatctgataaaaagaattatggtttagcaggagcgcattgttgagcacaatgatgttgaaaaagtgtgctaatctgccctccgttcggctgtttcttcatcgtgtcgcataaaatgtgaccaataaaacaaattatgcaattttttagttgcatgaactcgcatgtctccatagaatgcgcgctacttgatgccgacttagctcagtaggtagagcaactgacttgtaatcagtaggtcaccagttcgattccggtagtcggcaccatcaagtccggtggggttcccgagcggccaaagggagcagactgtaaatctgccgtcacagacttcgaaggttcgaatccttcccccaccaccaatttcggccacgcgatggcgtagcccgagacgataagttcgcttaccggctcgaataaagagagcttctctcgatattcagtgcagaatgaaaatcaggtagccgagttccaggatgcgggcatcgtataatggctattacctcagccttccaagctgatgatgcgggttcgattcccgctgcccgctccaagatgtgctgatatagctcagttggtagagcgcacccttggtaagggtgaggtcggcagttcgaatctgcctatcagcaccacttcttttctcctccctgttttttccttctgtttattgcattcaacaagtcgggcatgttgcctggttgatgtggtgatatcaccgatttatccgtgtcttagagggacaatcgatgtctaaagaaaagtttgaacgtacaaaaccgcacgttaacgtcggtactatcggccacgttgaccatggtaaaacaacgctgaccgctgcaatcactaccgtactggctaaaacctacggcggtgctgctcgcgcattcgaccagatcgataacgcgccggaagaaaaagctcgtggtatcaccatcaacacttctcacgttgaatacgacaccccgacccgtcactacgcacacgtagactgcccggggcacgccgactatgttaaaaacatgatcaccggtgctgcgcagatggacggcgcgatcctggtagttgctgcgactgacggcccgatgccgcagactcgtgagcacatcctgctgggtcgtcaggtaggcgttccgtacatcatcgtgttcctgaacaaatgcgacatggttgatgacgaagagctgctggaactggttgaaatggaagttcgtgaacttctgtctcagtacgacttcccgggcgacgacactccgatcgttcgtggttctgctctgaaagcgctggaaggcgacgcagagtgggaagcgaaaatcctggaactggctggcttcctggattcttacattccggaaccagagcgtgcgattgacaagccgttcctgctgccgatcgaagacgtattctccatctccggtcgtggtaccgttgttaccggtcgtgtagaacgcggtatcatcaaagttggtgaagaagttgaaatcgttggtatcaaagagactcagaagtctacctgtactggcgttgaaatgttccgcaaactgctggacgaaggccgtgctggtgagaacgtaggtgttctgctgcgtggtatcaaacgtgaagaaatcgaacgtggtcaggtactggctaagccgggcaccatcaagccgcacaccaagttcgaatctgaagtgtacattctgtccaaagatgaaggcggccgtcatactccgttcttcaaaggctaccgtccgcagttctacttccgtactactgacgtgactggtaccatcgaactgccggaaggcgtagagatggtaatgccgggcgacaacatcaaaatggttgttaccctgatccacccgatcgcgatggacgacggtctgcgtttcgcaatccgtgaaggcggccgtaccgttggcgcgggcgttgtagcaaaagttctgagctaattgccgataacatttgacgcaatgcgcactaaaagggcatcatttgatgccctttttgcacgctttcgtaccagaacctggctcatcagtgattttctttgtcataatcattgctgagacaggctctgttgagggcgtataatccgaaaagctaatacgcgtttcgatttggtttgcctcgcgatcgcggggtgaaaatgtttgtagaaaacttctgacaggttggtttatgagtgcgaataccgaagctcaaggaagcgggcgcggcctggaagcgatgaagtgggtcgttgtggtggcattgctcctggtggcgattgtcggcaactatctttatcgcgacattatgctgccgctgcgtgcgctggccgtagtaattctgattgctgcagcgggtggtgtcgcgctgttaacgacaaaaggtaaagctaccgttgcttttgcccgtgaagcgcgtaccgaagtccgtaaggtcatttggccgactcgccaggaaacattgcacaccacgctgattgtggctgcggttaccgcagtaatgagtctgatcctgtggggactggatggtattctggttcgcctggtatcctttatcactggcctgaggttctgagatgtctgaagctcctaaaaagcgctggtacgtcgttcaggcgttttccggttttgaaggccgcgtagcaacgagcctgcgtgagcatatcaaattacacaacatggaagatttgtttggtgaagtcatggtaccaaccgaagaagtggttgaaatccgtggcggtcagcgtcgcaaaagcgaacgtaaattcttccctggctacgtcctcgttcagatggtgatgaacgacgcgagctggcacctggtgcgcagcgtaccgcgtgtgatgggcttcatcggcggtacttccgatcgtcctgcgccaatcagcgataaagaagtcgatgcgattatgaaccgcctgcagcaggttggtgataagccgcgtccgaaaacgctgtttgaaccgggtgaaatggtccgtgttaatgatggtccgttcgctgacttcaacggtgttgttgaagaagtggattacgagaaatctcgtctgaaagtgtctgtttctatcttcggtcgtgcgaccccggtagagctggacttcagccaggttgaaaaagcctaacccagcgatcaaaaaagcggcgatttaatcgttgcacaaggcgtgagattggaatacaatttcgcgccttttgtttttatgggccttgcccgtaaaacgattttttatatcacggggagcctctcagaggcgttattacccaacttgaggaatttataatggctaagaaagtacaagcctatgtcaagctgcaggttgcagctggtatggctaacccgagtccgccagtaggtccggctctgggtcagcagggcgtaaacatcatggaattctgcaaagcgttcaacgcaaaaactgattccatcgaaaaaggtctgccgattccggtagtaatcaccgtttacgctgaccgttctttcactttcgttaccaagaccccgccggcagcagttctgctgaaaaaagcggctggtatcaagtctggttccggtaagccgaacaaagacaaagtgggtaaaatttcccgcgctcagctgcaggaaatcgcgcagaccaaagctgccgacatgactggtgccgacattgaagcgatgactcgctccatcgaaggtactgcacgttccatgggcctggtagtggaggactaagaaatggctaaactgaccaagcgcatgcgtgttatccgcgagaaagttgatgcaaccaaacagtacgacatcaacgaagctatcgcactgctgaaagagctggcgactgctaaattcgtagaaagcgtggacgtagctgttaacctcggcatcgacgctcgtaaatctgaccagaacgtacgtggtgcaactgtactgccgcacggtactggccgttccgttcgcgtagccgtatttacccaaggtgcaaacgctgaagctgctaaagctgcaggcgcagaactggtaggtatggaagatctggctgaccagatcaagaaaggcgaaatgaactttgacgttgttattgcttctccggatgcaatgcgcgttgttggccagctgggccaggttctgggtccgcgcggcctgatgccaaacccgaaagtgggtactgtaacaccgaacgttgctgaagcggttaaaaacgctaaagctggccaggttcgttaccgtaacgacaaaaacggcatcatccacaccaccatcggtaaagtggactttgacgctgacaaactgaaagaaaacctggaagctctgctggttgcgctgaaaaaagcaaaaccgactcaggcgaaaggcgtgtacatcaagaaagttagcatctccaccaccatgggtgcaggtgttgcagttgaccaggctggcctgagcgcttctgtaaactaatgcctttacgtgggcggtgattttgtctacaatcttacccccacgtataatgcttaatgcagacgtatatccgagatattcgggttgtggcaaggcggcaactgagtgagtcgccaggagcatagctaactatgtgactggtgcgaatgaaggaagccaacgccgtcacaagctgaatagcgacggatagaaaagatttgttcgttggagcctggcctatccaggcctccgtcgaagaccgcaggagtttcgcaagaaacttaatcccctgcgtagacggtgacagaacgctaagattattcttttatattctggcttgtttctgctcaccgtaattaagacgctctctccgtttggaggagtgaagtgagttccagagattttctctggcaaacatccaggagcaaagctaatggctttaaatcttcaagacaaacaagcgattgttgctgaagtcagcgaagtagccaaaggcgcgctgtctgcagtagttgcggattcccgtggcgtaactgtagataaaatgactgaactgcgtaaagcaggtcgcgaagctggcgtatacatgcgtgttgttcgtaacaccctgctgcgccgtgctgttgaaggtactccgttcgagtgcctgaaagacgcgtttgttggtccgaccctgattgcatactctatggaacacccgggcgctgctgctcgtctgttcaaagagttcgcgaaagcgaatgcaaaatttgaggtcaaagccgctgcctttgaaggtgagctgatcccggcgtctcagatcgaccgcctggcaactctgccgacctacgaagaagcaattgcacgcctgatggcaaccatgaaagaagctagcgctggcaaactggttcgtactctggctgctgtacgcgatgcgaaagaagctgcttaatcgcagttatctttttaacgcattcgcttacgtataaacttattctgatattcaggaacaatttaaatgtctatcactaaagatcaaatcattgaagcagttgcagctatgtctgtaatggacgttgtagaactgatctctgcaatggaagaaaaattcggtgtttccgctgctgctgctgtagctgtagctgctggcccggttgaagctgctgaagaaaaaactgaattcgacgtaattctgaaagctgctggcgctaacaaagttgctgttatcaaagcagtacgtggcgcaactggcctgggtctgaaagaagctaaagacctggtagaatctgcaccggctgctctgaaagaaggcgtgagcaaagacgacgcagaagcactgaaaaaagctctggaagaagctggcgctgaagttgaagttaaataagccaacccttccggttgcagcctgagaaatcaggctgatggctggtgactttttagtcaccagcctttttgcgctgtaaggcgccagtagcgtttcacactgtttgactactgctgtgcctttcaatgcttgtttctatcgacgacttaatatactgcgacaggacgtccgttctgtgtaaatcgcaatgaaatggtttaagcgtgatagcaacaggcattgcggaaagtgttccattttccggtcaacaaaatagtgttgcacaaactgtccgctcaatggacagatgggtcgacttgtcagcgagctgaggaaccctatggtttactcctataccgagaaaaaacgtattcgtaaggattttggtaaacgtccacaagttctggatgtaccttatctcctttctatccagcttgacagctttcagaaatttatcgagcaagatcctgaagggcagtatggtctggaagctgctttccgttccgtattcccgattcagagctacagcggtaattccgagctgcaatacgtcagctaccgccttggcgaaccggtgtttgacgtccaggaatgtcaaatccgtggcgtgacctattccgcaccgctgcgcgttaaactgcgtctggtgatctatgagcgcgaagcgccggaaggcaccgtaaaagacattaaagaacaagaagtctacatgggcgaaattccgctcatgacagacaacggtacctttgttatcaacggtactgagcgtgttatcgtttcccagctgcaccgtagtccgggcgtcttctttgactccgacaaaggtaaaacccactctagcggtaaagtgctgtataacgcgcgtatcatcccttaccgtggttcctggctggacttcgaattcgatccgaaggacaacctgttcgtacgtatcgaccgtcgccgtaaactgcctgcgaccatcattctgcgcgccctgaactacaccacagagcagatcctcgacctgttctttgaaaaagttatctttgaaatccgtgataacaagctgcagatggaactggtgccggaacgcctgcgtggtgaaaccgcatcttttgacatcgaagctaacggtaaagtgtacgtagaaaaaggccgccgtatcactgcgcgccacattcgccagctggaaaaagacgacgtcaaactgatcgaagtcccggttgagtacatcgcaggtaaagtggttgctaaagactatattgatgagtctaccggcgagctgatctgcgcagcgaacatggagctgagcctggatctgctggctaagctgagccagtctggtcacaagcgtatcgaaacgctgttcaccaacgatctggatcacggcccatatatctctgaaaccttacgtgtcgacccaactaacgaccgtctgagcgcactggtagaaatctaccgcatgatgcgccctggcgagccgccgactcgtgaagcagctgaaagcctgttcgagaacctgttcttctccgaagaccgttatgacttgtctgcggttggtcgtatgaagttcaaccgttctctgctgcgcgaagaaatcgaaggttccggtatcctgagcaaagacgacatcattgatgttatgaaaaagctcatcgatatccgtaacggtaaaggcgaagtcgatgatatcgaccacctcggcaaccgtcgtatccgttccgttggcgaaatggcggaaaaccagttccgcgttggcctggtacgtgtagagcgtgcggtgaaagagcgtctgtctctgggcgatctggataccctgatgccacaggatatgatcaacgccaagccgatttccgcagcagtgaaagagttcttcggttccagccagctgtctcagtttatggaccagaacaacccgctgtctgagattacgcacaaacgtcgtatctccgcactcggcccaggcggtctgacccgtgaacgtgcaggcttcgaagttcgagacgtacacccgactcactacggtcgcgtatgtccaatcgaaacccctgaaggtccgaacatcggtctgatcaactctctgtccgtgtacgcacagactaacgaatacggcttccttgagactccgtatcgtaaagtgaccgacggtgttgtaactgacgaaattcactacctgtctgctatcgaagaaggcaactacgttatcgcccaggcgaactccaacttggatgaagaaggccacttcgtagaagacctggtaacttgccgtagcaaaggcgaatccagcttgttcagccgcgaccaggttgactacatggacgtatccacccagcaggtggtatccgtcggtgcgtccctgatcccgttcctggaacacgatgacgccaaccgtgcattgatgggtgcgaacatgcaacgtcaggccgttccgactctgcgcgctgataagccgctggttggtactggtatggaacgtgctgttgccgttgactccggtgtaactgcggtagctaaacgtggtggtgtcgttcagtacgtggatgcttcccgtatcgttatcaaagttaacgaagacgagatgtatccgggtgaagcaggtatcgacatctacaacctgaccaaatacacccgttctaaccagaacacctgtatcaaccagatgccgtgtgtgtctctgggtgaaccggttgaacgtggcgacgtgctggcagacggtccgtccaccgacctcggtgaactggcgcttggtcagaacatgcgcgtagcgttcatgccgtggaatggttacaacttcgaagactccatcctcgtatccgagcgtgttgttcaggaagaccgtttcaccaccatccacattcaggaactggcgtgtgtgtcccgtgacaccaagctgggtccggaagagatcaccgctgacatcccgaacgtgggtgaagctgcgctctccaaactggatgaatccggtatcgtttacattggtgcggaagtgaccggtggcgacattctggttggtaaggtaacgccgaaaggtgaaactcagctgaccccagaagaaaaactgctgcgtgcgatcttcggtgagaaagcctctgacgttaaagactcttctctgcgcgtaccaaacggtgtatccggtacggttatcgacgttcaggtctttactcgcgatggcgtagaaaaagacaaacgtgcgctggaaatcgaagaaatgcagctcaaacaggcgaagaaagacctgtctgaagaactgcagatcctcgaagcgggtctgttcagccgtatccgtgctgtgctggtagccggtggcgttgaagctgagaagctcgacaaactgccgcgcgatcgctggctggagctgggcctgacagacgaagagaaacaaaatcagctggaacagctggctgagcagtatgacgaactgaaacacgagttcgagaagaaactcgaagcgaaacgccgcaaaatcacccagggcgacgatctggcaccgggcgtgctgaagattgttaaggtatatctggcggttaaacgccgtatccagcctggtgacaagatggcaggtcgtcacggtaacaagggtgtaatttctaagatcaacccgatcgaagatatgccttacgatgaaaacggtacgccggtagacatcgtactgaacccgctgggcgtaccgtctcgtatgaacatcggtcagatcctcgaaacccacctgggtatggctgcgaaaggtatcggcgacaagatcaacgccatgctgaaacagcagcaagaagtcgcgaaactgcgcgaattcatccagcgtgcgtacgatctgggcgctgacgttcgtcagaaagttgacctgagtaccttcagcgatgaagaagttatgcgtctggctgaaaacctgcgcaaaggtatgccaatcgcaacgccggtgttcgacggtgcgaaagaagcagaaattaaagagctgctgaaacttggcgacctgccgacttccggtcagatccgcctgtacgatggtcgcactggtgaacagttcgagcgtccggtaaccgttggttacatgtacatgctgaaactgaaccacctggtcgacgacaagatgcacgcgcgttccaccggttcttacagcctggttactcagcagccgctgggtggtaaggcacagttcggtggtcagcgtttcggggagatggaagtgtgggcgctggaagcatacggcgcagcatacaccctgcaggaaatgctcaccgttaagtctgatgacgtgaacggtcgtaccaagatgtataaaaacatcgtggacggcaaccatcagatggagccgggcatgccagaatccttcaacgtattgttgaaagagattcgtagcctgggtatcaacatcgaactggaagacgagtaattctcgctcaaacaggtcactgctgtcgggttaaaacccggcagcggattgtgctaactccgacgggagcaaatccgtgaaagatttattaaagtttctgaaagcgcagactaaaaccgaagagtttgatgcgatcaaaattgctctggctagcccagacatgatccgtagttggtctttcggtgaagttaaaaagccggaaaccatcaactaccgtacgttcaaaccagaacgtgacggccttttctgcgcccgtatctttgggccggtaaaagattacgagtgcctgtgcggtaagtacaagcgcctgaaacaccgtggcgtcatctgtgagaagtgcggcgttgaagtgacccagactaaagtacgccgtgagcgtatgggccacatcgaactggcttccccgactgcgcacatctggttcctgaaaagcctgccgtcccgtatcggtctgctgctcgatatgccgctgcgcgatatcgaacgcgtactgtactttgaatcctatgtggttatcgaaggcggtatgaccaacctggaacgtcagcagatcctgactgaagagcagtatctggacgcgctggaagagttcggtgacgaattcgacgcgaagatgggggcggaagcaatccaggctctgctgaagagcatggatctggagcaagagtgcgaacagctgcgtgaagagctgaacgaaaccaactccgaaaccaagcgtaaaaagctgaccaagcgtatcaaactgctggaagcgttcgttcagtctggtaacaaaccagagtggatgatcctgaccgttctgccggtactgccgccagatctgcgtccgctggttccgctggatggtggtcgtttcgcgacttctgacctgaacgatctgtatcgtcgcgtcattaaccgtaacaaccgtctgaaacgtctgctggatctggctgcgccggacatcatcgtacgtaacgaaaaacgtatgctgcaggaagcggtagacgccctgctggataacggtcgtcgcggtcgtgcgatcaccggttctaacaagcgtcctctgaaatctttggccgacatgatcaaaggtaaacagggtcgtttccgtcagaacctgctcggtaagcgtgttgactactccggtcgttctgtaatcaccgtaggtccatacctgcgtctgcatcagtgcggtctgccgaagaaaatggcactggagctgttcaaaccgttcatctacggcaagctggaactgcgtggtcttgctaccaccattaaagctgcgaagaaaatggttgagcgcgaagaagctgtcgtttgggatatcctggacgaagttatccgcgaacacccggtactgctgaaccgtgcaccgactctgcaccgtctgggtatccaggcatttgaaccggtactgatcgaaggtaaagctatccagctgcacccgctggtttgtgcggcatataacgccgacttcgatggtgaccagatggctgttcacgtaccgctgacgctggaagcccagctggaagcgcgtgcgctgatgatgtctaccaacaacatcctgtccccggcgaacggcgaaccaatcatcgttccgtctcaggacgttgtactgggtctgtactacatgacccgtgactgtgttaacgccaaaggcgaaggcatggtgctgactggcccgaaagaagcagaacgtctgtatcgctctggtctggcttctctgcatgcgcgcgttaaagtgcgtatcaccgagtatgaaaaagatgctaacggtgaattagtagcgaaaaccagcctgaaagacacgactgttggccgtgccattctgtggatgattgtaccgaaaggtctgccttactccatcgtcaaccaggcgctgggtaaaaaagcaatctccaaaatgctgaacacctgctaccgcattctcggtctgaaaccgaccgttatttttgcggaccagatcatgtacaccggcttcgcctatgcagcgcgttctggtgcatctgttggtatcgatgacatggtcatcccggagaagaaacacgaaatcatctccgaggcagaagcagaagttgctgaaattcaggagcagttccagtctggtctggtaactgcgggcgaacgctacaacaaagttatcgatatctgggctgcggcgaacgatcgtgtatccaaagcgatgatggataacctgcaaactgaaaccgtgattaaccgtgacggtcaggaagagaagcaggtttccttcaacagcatctacatgatggccgactccggtgcgcgtggttctgcggcacagattcgtcagcttgctggtatgcgtggtctgatggcgaagccggatggctccatcatcgaaacgccaatcaccgcgaacttccgtgaaggtctgaacgtactccagtacttcatctccacccacggtgctcgtaaaggtctggcggataccgcactgaaaactgcgaactccggttacctgactcgtcgtctggttgacgtggcgcaggacctggtggttaccgaagacgattgtggtacccatgaaggtatcatgatgactccggttatcgagggtggtgacgttaaagagccgctgcgcgatcgcgtactgggtcgtgtaactgctgaagacgttctgaagccgggtactgctgatatcctcgttccgcgcaacacgctgctgcacgaacagtggtgtgacctgctggaagagaactctgtcgacgcggttaaagtacgttctgttgtatcttgtgacaccgactttggtgtatgtgcgcactgctacggtcgtgacctggcgcgtggccacatcatcaacaagggtgaagcaatcggtgttatcgcggcacagtccatcggtgaaccgggtacacagctgaccatgcgtacgttccacatcggtggtgcggcatctcgtgcggctgctgaatccagcatccaagtgaaaaacaaaggtagcatcaagctcagcaacgtgaagagcgttgtgaactccagcggtaaactggttatcacttcccgtaatactgaactgaaactgatcgacgaattcggtcgtactaaagaaagctacaaagtaccttacggtgcggtactggcgaaaggcgatggcgaacaggttgctggcggcgaaaccgttgcaaactgggacccgcacaccatgccggttatcaccgaagtaagcggttttgtacgctttactgacatgatcgacggccagaccattacgcgtcagaccgacgaactgaccggtctgtctagcctggtggttctggattccgcagaacgtaccgcaggtggtaaagatctgcgtccggcactgaaaatcgttgatgctcagggtaacgacgttctgatcccaggtaccgatatgccagcgcagtacttcctgccgggtaaagcgattgttcagctggaagatggcgtacagatcagctctggtgacaccctggcgcgtattccgcaggaatccggcggtaccaaggacatcaccggtggtctgccgcgcgttgcggacctgttcgaagcacgtcgtccgaaagagccggcaatcctggctgaaatcagcggtatcgtttccttcggtaaagaaaccaaaggtaaacgtcgtctggttatcaccccggtagacggtagcgatccgtacgaagagatgattccgaaatggcgtcagctcaacgtgttcgaaggtgaacgtgtagaacgtggtgacgtaatttccgacggtccggaagcgccgcacgacattctgcgtctgcgtggtgttcatgctgttactcgttacatcgttaacgaagtacaggacgtataccgtctgcagggcgttaagattaacgataaacacatcgaagttatcgttcgtcagatgctgcgtaaagctaccatcgttaacgcgggtagctccgacttcctggaaggcgaacaggttgaatactctcgcgtcaagatcgcaaaccgcgaactggaagcgaacggcaaagtgggtgcaacttactcccgcgatctgctgggtatcaccaaagcgtctctggcaaccgagtccttcatctccgcggcaagcttccaggagaccactcgcgtgctgaccgaagcagccgttgcgggcaaacgcgacgaactgcgcggcctgaaagagaacgttatcgtgggtcgtctgatcccggcaggtaccggttacgcgtaccaccaggatcgtatgcgtcgccgtgctgcgggtgaagctccggctgcaccgcaggtgactgcagaagacgcatctgccagcctggcagaactgctgaacgcaggtctgggcggttctgataacgagtaatcgttaatccgcaaataacgtaaaaacccgcttcggcgggtttttttatggggggagtttagggaaagagcatttgtcagaatatttaaggaatttctgaatactcataatcaatgtagagatgactaatatcctgaaactgactgaactaattgagtcaaactcggcaaggattcgatactattcctgtgtaactttcttaaggaacgagaatgaaacaggaagtggaaaagtggcgaccttttggacatccggatggtgatattcgtgatttaagttttcttgatgctcatcaggctgtctacgttcagcatcatgagggcaaagagcctttagagtatcgcttttgggttacctactctcttcactgcttcacaaaagattatgaacatcagacgaacgaagaaaaacaaagcttaatgtaccacgcgcctaaagaatctcgtcccttctgccagcaccgttataacttagcgcgcacacacttaaaaagaactattttggcgctgccagaaagcaacgttattcatgccgggtatggtagctatgccgtgattgaggtggacttagacggaggagataaggcattttactttgttgcgttcagggctttcagggaaaagaaaaaactccgtttgcatgtaactagcgcttatcccatttctgaaaaacagaaaggtaaaagtgtgaaatttttcaccattgcctacaacttattgagaaataagcagcttcctcagcccagtaaataacaaaacccaccttaaggtgggtttcgccagagaattatctctggtattcagaacgccattaccggactttgccttgaccttgcgataatcgcaggttgcgggatgtctgaatttcttcagtctgctgcatcctggaagatgagaacatgtgttcttattttcgtctctatcatagttgagtatttactctcttacaatcagatctctttcattgctcaacaggcgatggcttcagactttgcattacggaatttttaagaaaggcagggcgaaacgaggaagaagcttttcgccctggacaacattcctgctgacggcactaccataaaaaaacacaacgctttcaacaaccttgcgtttttcatcttccgtagcggctcggaataaatttacgttcttacattccgtctcatagtctttggctggcgcgtcccagatagctgtcccagtctttccataccggctgcaaaccctgagcggttaacgcggcagcaaccgcttccggtctgcgatcgtcgtgcggactgaactgttccaactcggggtgattatcggcatagccacctggctgcgttttgctgaaggcgctgacgttattgatcgccagcggaataacgcgatcgcgaaaccacggactttcccgcgtggagagactcagttcaatctccggtgcaagcagtcggaaggcgcagatggtttgcactaactggcgttcatccataatgctcgcaggctcaatgccgccagtacacgggcgcaggcgcggaaaggagacagagtaacggctttgccagtaatgctgttgcagccatagcaaatgttcggcaaccatatagctgtcaacgcgccagttgtcggaaaggccaattagcgcgccgaggcctatcttatcaatccccgcacgccccagccgatccggcgtttccagccgccagaagaagtcctgttttttgcctttcagatgatggcgggcataagtcgcctcgtgatatgtctcctgataaaccatcacgccatccagaccaagttgctttaactcggcgtattccgtctccgccagcggttgcacttccatctgtagactagagaactgttcacgaagggcagggagatgacgacgaaagtaatccatccccactttcgcctgatgttcaccagtgactaacagcagatgttcaaagcccatctcccgtatagcggcactttccctggcaatatccgcttcatccagcgttttgcgcttgatgcgattactcatggaaaatccacagtacgtgcagtcgttagcgcaaagattggaaagataaagcgggacgtagaaactaactgtgttgccaaatcgctgacgggtcagacgctgcgcccgttgggccagttgttccagatagccactggcggcagggcttaacagcgccatcatgtcgtcgcgggtgagttggctggcatttagcgcccgctctacgtcagcagccgttttgccgttgatacgcaggcggatgtcgtcccagtccagttgtcgccagcgatcgctgaaggttttcatgcgcttgcctccagaaatccggtcagcgggctggtggcatgagcaaaataactgcggctgcccggtccggactgacgtgccagtaggcctgcttctaccgccagacgaaatgccttcgccatgttgacgggatcgtccgcgacggcaatcgccgtattcactaacaccgcgtcggcccccatttccagcgcctgcgcggcatggctgggaacgccgatgccagcatcgacaaccaccggcactgtggcctgctggataataatctccagcatggcgcgggtttccagtccctgattgctgccaatcggcgcgccgagcggcatcaccgctgcacagccgacttcttccagacgtttacacaataccggatcggccccgcagtaaggcagcacgacaaatccctgttgtaccagcgtttcggcggctttcagggtttcgatgggatcgggcaacagccagcgggcgtcagggtgaatctctaattttaaccagtttgtgcctaacgcttcacgagccagatgggcggcgaaaatggcttcttccgctgttttcgccccggatgtatttggcagcagggtcacacccgccgcgataagcggttcgaggatagcgtcgttgtgctggcgcaagtcgacacgtttcatcgccagtgtcaccagctggctgccggaagcgcggatcgcctccaccatcagttgactagaagcgaatttccctgtgccggtaaacagatgactatcaaacgttttgtccgcaatacgtaacatttcaaccccctgcaataacctgaaaaagcaggatctggtcgccatcctgcacgatatgttgcgcccactgctcacgcgggacgatttgctgattaatcgccagagccgcgcccgcttgtcgttggtcgagttgctccagtagttcgtgaacagtttgcccggcggcgcactgcatcgcttgatcgttaaacaggatctgcattgcttcctccgcataccgggcaaccactggcgcggcgcaacgccaggctgcgccactggctgcttttaccgtcgaacagtcggagttctcccgcaggtgtctctataccgcttaataacttaatggcttccagtgcctgcaaagtgcccataaccccgaccaccgggccaaccacgcccgccgtgcggcagttgcgttctggctcctggttatctggccacaggcagcggtaacacccctgctcccagggcggcgtcagtaccatcaactgaccgccaaatccgaccgcgctggcggtgataagcggcgtgttgagtgccacgcaggcggcattaatctcctggcgagtcgccatattgtcggtacagtcgagcaccacatcggcccgtgcaaccgcatcttttaacgcctcacccgttaaccgttgttgtaatgctgtcagttgaatgtcgggattcaactgtgtcagtcgctgttggctgacctggcttttcgggcgatcgatatcttcagtggtaaagaggatttgtcgttgcagattgcttaaatgcacatcgtcgtcatctgccagtaccagcgtcccgacgccagcgcccgccaggtacagcgcagcaggtgtacccagcccgcccagaccgataatcagcacctggctgtcgagcagtttttgctgcccgtccagagcgatatcgtcgagcaggatttggcggctataacgcataaagtcacggtcattcatcgccaactcctgcaatttccagcaactgtgccgttgccaaacgccagtctgcggcttgagtaatggcgctgacgacggcgatactgccgacacccgttgctatcaccgcaggcgcgcgtgccagactgataccgccaatcgccacggtgggataatccgccagtcgctcaacatgccgtgccagctgttccagcccctgcggtgcagaaggcatctgtttggtttgcgtcgggaacacatgtcccagcgcgatataagaggggcgtgctgccagcgcgacgtcgatttccatatcgtcatgtgtgctaacgcccagccgcaggcctgccgcgcggatggcattgagatcggtggcttgcaaatcttcctgccccaaatggacgccatacgcctgatgcttgatcgccagccgccagtaatcgttgataaacaatcgcgcgttatagcggcggcccagcgcaattgccgccacgacatcggcttccacctcttcatcgcgccgatctttgatgcgtagctggagagtacgtacgcctgcatccaacagacgttcgatccactgtacgctgtccaccaccgggtacagtccactacgaaaaggtacaggaggaaaatcaggctgatacatcacgcttcctccttacgcaggtagatttctccgcctctggcacggaagttctcgctcatatccgccattcccatttcaatagtttgcgtggcggcgtaatcacgcacttcctggctgattttcatgctgcagaatttcggcccacacatggagcaaaaatgggcgactttaccactctcttgcggcagggtttcatcgtgataagcgcgggcggtaaacgggtcgagggccagattaaactggtcttcccagcgaaattcgaagcgggctttgctcatggcgttatcgcgaatttgcgcgcccggatgccctttcgccaggtcagcggcgtgggcagcaatcttataggtgataagcccctgcttaacatcttctttattgggcagacccagatgctcttttggcgttacgtaacagagcatcgcgcagccaaaccagccaatcatcgccgcaccaatcccgctcgtgaagtggtcatagcccggcgcaatatcggtagttagcggccccagagtgtaaaacggcgcttcgtggcagtgctctaactcctcggtcatattgcggcggatcatctgcatcggcacgtggcctgggccttcaatcatcacctgcacgtcatattcccaggcaattttggtcagttcgcccagcgtatgcagctcggcaaactgcgcttcatcgttggcgtcctgaatagaaccggggcgcagaccgtcgcccaggctcaggctaacgtcataagcggcacagatttcacaaatttcgcggaagtgttgatagaggaaattttcctgatgatgggagaggcaccatttcgccataatgctaccgccgcgagagacgataccggtcaggcgtttcgcggtcatcggcacatagcgcagcagtacgcccgcatggatagtgaagtaatccacaccttgctcggcctgttccagcagcgtgtcgcggaacgcttcccaggtaagatcttcggcgatcccgttaaccttctccagcgcctggtagatcggcactgtaccgatcggcaccgggctgttacgcaaaatccactcgcgggtttcgtgaatatagcgaccggtggagagatccatcaccgtatccgctccccagcgcgtggaccataccagcttttccacttcttcttcgatggaagaggtgaccgcgctgttgccgatattggcgttaacttttaccaggaaattgcgaccaataatcatcggctcgctttccggatgattaatgttggccgggataatcgcacgtccggcagcaacttcatcacggacaaattccgcagtgatattttccggcagatgtgcgccaaagctcattcccggatgctggtggcgtaaaacctcgctacggatgcgctcgcggcccatattctcgcggatggcgatgaattccatttccggcgtgatgatgccctggcgggcgtagtgcagttgggtgacacggcgtcctgctttggcgcgttttggtgttagtacgccgctaaaacgcagttcgtcgaggccatcatctgccagccgcgctttagtgtaatcggaactgcgcacggtaagttcttcggtatcgccgcgcgcatcgatccacggctggcgtagttttgccagcccttgctgcacgttaatggcaatctgcggatcaccatacgggccggaggtgtcgtagaccggaatcgcttcgttttcttcgtactgcggctgttctttgctaccgccaattagcgtcgggctaagctggatctcacgcatcggcacgcgcacgccggggtgtgtgccagtgatataaatgcgtttactgttgggaaaggcggtgccttccagggtgtcgataaaatgttgggcccgggcgcgttgttcgcggcgggtcagttttgttgcagacatagctcattccaaaaagttaaggacgtggcttgtcagacgacggatgaagcaagagacgatcgccgcaggggcgatgcgatagcagattaactcttgttcccttcgcaggtattagcctgatcaggttccgcggatcccgaataaacggtctcagccagttaaggcactccgacaagaaattagccccgcaaatggggcattgaatgtaaattacgcgttaacagcgcagaactcaagcaggatgtttgacgcgggcggcgtcaagcaccagcagaatcagcttatcttccagcacaaagcgcgcttccagcgcctcgccgatgtcagataaaacctgttgaaactcaaggtaattatcatgatcgatggcggtttccagactggaatcgtagtaatccataatctgttgagtattggcttcgagttgcggccaaatcttcgcggcgcgcgcgagttgcccgttgccttccagcttatgaagaatgcgctcataaatactgaaatgtccggcagacaagtaatcgaccaggctctgacaaaaatcatcaagggctttttcgtttagcctcatgtagctttctttgccaggcttaatgccaaccagattgtagtaagccacgagcagatgcttacgtacatgtagccagcgatcaaccagtttgttacttcctctgacgcgctccgtcaggttatcgagctggttaagcatgattgactccgcaagtttgtattcaaaaactgctcagtgagaaatgtaaaaaccatgttaaacatgccagtgatgcaaaggtagtgcaagagctatggatcgtataattgaaaaattagatcacggctggtgggtcgtcagccatgaacaaaaattatggttgccgaagggagaattgccatatggcgaagcggcaaatttcgatcttgtgggtcagcgcgcactacaaatcggcgaatggcagggggaacctgtttggttagtacaacagcagcggcgtcacgatatggggagcgtacgtcaggtcattgatctcgatgttgggctgtttcaactggccggacgaggcgtacaactggcggagttttaccgaagccataaatactgtggttactgcgggcatgaaatgtatccgagcaaaaccgaatgggcgatgctgtgcagccattgccgtgagcgttactacccgcaaatcgccccctgcattattgttgccatccgtcgcgatgatagcatcctcctcgcccagcatacccgccatcgtaacggtgtccatacagtacttgccggattcgtcgaagtgggcgaaaccctcgagcaggcagtcgcgcgggaagtgatggaagagagcggaattaaagttaaaaacttgcgttacgtgacttctcagccgtggccgtttcctcagtctttaatgaccgcgtttatggcggaatatgacagcggcgacatcgtgatcgacccgaaagaattgctcgaggcgaactggtatcgctatgacgatttgccgttactcccgccgcccggcaccgtagcgcgccgtctgatagaagatacggtggcgatgtgtcgggcagagtatgagtgatgatacactgaccgcctgacgcactaaggaacagccaaaatgaccgaacttaaaaacgatcgttatctgcgggcgctgctgcgccagcccgttgatgtcactccagtatggatgatgcgccaggcgggtcgctatctaccggaatataaagccacgcgcgcccaggcaggcgattttatgagcctgtgcaaaaacgccgagctggcgtgcgaagtgactttgcaaccgctgcgtcgctacccgctggatgcggcgatcctcttttccgatatcctcaccgtgccggacgcgatggggttagggctctattttgaagccggagaaggtccgcgttttaccagcccagtcacctgcaaagctgacgtcgataaactgccaattccggacccggaagatgaactgggttacgtgatgaacgcggtgcgtaccattcgtcgcgaactgaaaggcgaagtgccgctgattggtttttccggcagcccgtggacgctggcgacctacatggtggaaggcggcagcagcaaagccttcaccgtgatcaaaaaaatgatgtatgccgatccgcaggcgctgcacgctctgctcgataaactggcgaaaagcgtcactttgtatctgaatgcgcagattaaagccggtgctcaggcagtgatgattttcgacacctggggcggcgtgcttaccgggcgcgattatcaacagttcagcctctattacatgcataaaattgttgatggtttactgcgtgaaaacgacggtcgccgcgtaccggtcacgctgtttaccaaaggcggcggacagtggctggaagccatggcagaaaccggttgcgatgcgctgggcctcgactggacaacggacatcgccgatgcgcgccgccgtgtgggcaataaagtcgcgttgcagggtaatatggatccgagcatgctgtacgcgccgcctgcccgcattgaagaagaagtagcgactatacttgcaggtttcggtcacggcgaaggtcatgtctttaaccttggtcacggcattcatcaggatgtgccgccagaacatgctggcgtgttcgtggaggcagtgcatcgactgtctgaacagtatcaccgctaaggagtgattatggatctcgcgagtttacgcgctcaacaaatcgaactggcttcttctgtgatccgcgaggatcgactcgataaagatccaccggatctgatcgccggagccgatgtcgggtttgagcagggcggagaagtgacgcgagcggcgatggtgctgctgaaatatcccagccttgagctggtcgagtataaagttgcccgcatcgccaccaccatgccttacattccaggttttctttccttccgcgaatatcctgcgctgctggcagcgtgggagatgctgagccaaaagccggatttagtgtttgtcgatggtcatgggatcagccatcctcgccgtcttggcgtcgccagccattttggcttattggtggatgtgccgaccattggcgtggcgaaaaaacggctctgcggtaaattcgaaccgctctccagcgaaccgggcgcgctggccccactgatggataaaggcgagcagctggcctgggtctggcgcagcaaagcgcgctgtaacccgttgtttatcgctaccggccatcgggtcagcgtggacagcgcgctggcgtgggtacaacgctgcatgaaaggctatcgtctgccggagccaacgcgctgggcggacgcggtggccagcgaacgtccggcgttcgtgcgctatacagcaaatcagccctaattcaggtaaactgcggataatttccgtatttgagaactcaacatgttacaaaacccaattcatctgcgtctggagcgcctggaaagctggcagcatgtcactttcatggcttgcttatgcgaacgcatgtaccccaattacgccatgttctgccagcaaaccggttttggtgatgggcaaatttaccgtcgcattctcgatctcatctgggaaacgctgaccgttaaagacgcaaaagtaaatttcgacagccaactggagaaatttgaagaagcgattcctagtgccgacgatttcgatctgtacggcgtttatccggcaatcgatgcctgcgtggcgttaagtgaactggtccatagccgtttgagtggtgaaacgctcgaacacgcggtggaagtgagtaagacctccatcacgaccgttgcgatgctggaaatgactcaggctggtcgcgaaatgagcgatgaagagcttaaagaaaacccagctgtagagcaagaatgggacattcagtgggaaatattccgacttttagctgagtgcgaagaacgcgatatcgagctgataaaaggccttagggcagacctgcgtgaggcgggtgagagcaatattggtataatttttcagcaataagaccagaaaacgtgatttaacgcctgatttgtcgtacctggagtcttccctttcgcccccgtctggtctacatttggggggcgaaaaaaagtggctatcggtgcgtgtatgcaggagagtgctattctggcatttccgtcgcactcgatgcttagcaagcgataaacacattgtaaggataacttatgaacaagactcaactgattgatgtaattgcagagaaagcagaactgtccaaaacccaggctaaagctgctctggagtccactctggctgcaattactgagtctctgaaagaaggcgatgctgtacaactggttggtttcggtaccttcaaagtgaaccaccgcgctgagcgtactggccgcaacccgcagaccggtaaagaaatcaaaattgccgcagctaacgtaccggcatttgtttctggcaaggcactgaaagacgcagttaagtaagattgcgtggcagtgaacagttttaacgaaggggtggttagtccccttttgtctttctggcgtcgaagtttgatgctggctggcgctctgcttctcactgcctgtagtcataactctagtcttcctccctttaccgccagtggatttgctgaagaccagggcgcggtacgcatctggcgaaaagacagcggcgataatgtgcatctgcttgccgtgtttagcccgtggcgcagtggcgataccacgacgcgagagtatcgctggcagggcgataacctcacgctcatcaatatcaatgtttacagcaaaccgccggtgaatattcgcgcgcgttttgacgatcgcggtgatctgagctttatgcaacgtgaatccgatggggaaaagcagcagctttctaacgaccaaatcgatttataccgttatcgtgctgatcagatccgccagattagcgatgccttacgtcaggggagagtcgtgctgcgccaggggcgctggcatgcgatggaacagaccgtgaccacctgcgaagggcaaaccattaaacctgatttagatagccaggcgatagcgcatatcgagcgccgccagagccgctcttctgttgatgtcagcgtggcatggctggaagcgcccgaaggtagccaattactgttagtggcaaactctgatttctgtcgctggcaacccaacgagaaaacgttctgatttaccagtggcccatacccatatgaccgccaccaccgcagccgccgtagcccatgcccattccggctccgcgcggaatacccgcttcagccatcgcgatatctcgtttcacccgtaactcatctaagctctgacgcaaattctccatctctttggcgaccgcgttaattttgctgctatccggtgggttcgcggctaacagggcattgtattcataacgcttcgtcaccagttgctgttgcagtgcgctgctttgagcgtaaaagtcattatggattttctgccacgctgtctgttgttcgctggtcaaaggcgcggcattttgctgccacataccgtgtccgccgtgagcaaatgcagatgtgcttcccatcgccattgcactaagcgccatcattaccagggcaattttcgtgttccgtttcatggttaatcctccagtggttgtcttacttcgggtattgcatcttccgtgccaacgatgaaacgctgatatgacgggtaatctggcatgataaacgagtaaaaatgactcgcctgctgcgggtagcgagtcatttttactcattgaaacttaagcctttgtgttacagcgcagggtaagcgctgataaaagatggcatgatttctgctgtcagaaagggatgagcaggcaaagaagaagatgcgttttatgcaacgttctaaagactccttagctaaatggttaagcgcgatcctccccgtggtcattgttgggctggtgggattgtttgcggtaactgtgattcgtgattatgggcgggcaagcgaggcagaccgccaggcattactggaaaaaggtaatgtgcttatccgcgctctggagagcggaagccgcgtagggatggggatgcgaatgcaccatgtacagcaacaggcgcttctggaagagatggcgggacagccgggagtgttgtggttcgcagtcaccgatgcgcagggcatcattattcttcatagcgaccccgataaggtcgggcgtgcgctctatagcccggatgaaatgcagaaattaaagccagaggaaaactcccgctggcggctgcttgggaaaacggaaactacgcctgcacttgaggtctatcgtttgttccagccaatgagtgcgccctggcggcatggaatgcacaatatgccgcgctgtaacggcaaagctgtgccacaagtagatgcacaacaggctatttttatcgccgttgatgccagtgatctggttgcaacccagagtggggaaaagcgcaataccctgattatcctcttcgccctggcgacggtcttgctggcaagcgtattgagtttcttctggtatcgccgctatctgcgcagccgccagcttctacaagatgaaatgaagcgcaaagagaagctggtggcgctggggcatcttgcggcaggcgttgcccacgaaatccgtaacccactttccagcattaaaggactggcgaaatactttgccgagcgcgcgcctgcagggggagaagcgcatcaactggcgcaggtgatggcgaaagaggccgaccgtttaaaccgcgtggtaagcgagttgctggaactggttaagccaacgcatctggctttgcaggcggtggatctcaacacgctgattaaccacagtttacagctggtaagtcaggatgcaaacagccgggagatccagttacgctttaccgccaacgacacattaccggaaattcaggccgacccggacaggctgactcaggtcctgttgaatctctatctcaatgctattcaggcgattggtcagcatggcgtgattagcgtgacggccagcgaaagcggcgcgggcgtgaaaatcagcgttaccgacagcggtaagggaattgcggcagatcagcttgatgccatcttcactccgtacttcaccactaaagccgaaggcaccggattggggctggcggtcgtgcataatattgttgaacaacacggtggtacaattcaggtcgcaagccaggagggaaaaggcagtacgttcaccctctggcttccggtcaatattacgcgtaaggacccacaaggatgacgcacgataatatcgatattctggtggtggatgatgacattagccactgcactattttgcaggctttactgcgcggctggggctataacgtcgcgctggcgaacagcgggcgacaggcgttggagcaggtgcgggaacaggtttttgatcttgtgctttgcgatgtgcgaatggcggagatggacggcatcgccacgctgaaagagatcaaagcgttaaacccggcaattccggtgctgattatgactgcgtactccagcgtcgagacggcggtagaggcactgaaaactggggcgctggattatctcatcaagccgctggatttcgataacctacaggcgacgctggaaaaagcgctcgcgcatacgcacagtattgatgctgaaacacctgcggtgactgccagccagttcggtatggtcggtaaaagcccggcgatgcaacacctgctcagtgaaatcgccctcgtcgcgccaagcgaagccacggtactgatccacggcgattccggcaccggtaaagagctggtcgccagggcgattcacgccagtagcgcacgtagcgaaaaaccgctggtaacgctcaactgtgcggcactcaacgaatccttgctggaatctgaattgttcggtcacgaaaaaggggcgtttactggagccgataaacgccgggaagggcgctttgttgaggcggacggcggcacgctgtttctcgatgaaattggcgatatcagcccgatgatgcaggtgcgtctgctgcgtgcgattcaggagcgcgaagttcagcgtgtcggtagcaaccagattatcagcgttgatgtccggctgattgcggcgacccatcgcgatcttgccgcagaggtgaatgccgggcgttttcgccaggatctctactatcgcctgaatgtggtggcgattgaagtaccaagcctgcggcaacggcgggaagatatccctctgctggctggccattttctgcagcgctttgccgagcgtaatcgcaaggcggtaaaaggttttacgccccaggcgatggatctgttgattcattacgactggccgggaaatattcgtgagctggaaaacgcggtggaacgggcagtggtgctgctgaccggggaatatatttccgaacgcgagctgccgctggcgattgccagtacgccgatcccgctgggacaaagtcaggatattcagccgttggtggaagtggaaaaagaggtgattctggcggcgctggagaaaacgggcggcaacaaaaccgaagccgcccgtcagttagggatcacgcgcaaaacgctattggcaaaactgagccgttaattctgctcgcgttcgatagcgcgccagccgatatctttccggcagaagcagtcgtcccagtggatatcggtcattaaggcataggcgcgtttctgcgcttctgccacggtatgacccagcgcggtgacgcacagtacgcgcccgccgttggtcactacctgctcgtcatccgccagttttgtgcccgcgtggaacactttgccgcctgccacttcttccagcggcaggccgtggatcacgtcaccggtgcggtaatcacccggatatccacccgcagccatcaccacgccgagagaagcgcgttcatcccactcggacgttttctcgtccagtttgctttcacaggccgccaggcagagctcaaccagatcggacttcatgcgcagcataatcggctgggtttccggatcgccaaagcggcagttaaattcaataaccttcggattgccctgtttgtcgatcatcaggcccgcgtagagaaaaccggtgtaggtgttgccttccgccgccatgcctttcacggttggccagataatacgttccatggtgcgctgatgaacgtcatcggttactaccggcgcgggggagtaagcgcccatcccgccggtgtttggtccggtatctttatcgcctacgcgtttgtgatcctggctggtagccatcggcagcacatgctcgccgtccaccatcacgataaagctcgcttcttcgccatcgaggaactcttcgataacgatgcgatgacccgcgtcgccaaaagcgttgcccgccagcatatcgtgaacagccgcttccgcttcttccagcgtcatcgccacgataacgcctttcccggcagccagaccgtccgctttaatgacgattggcgcgcctttctcacgcagatacgccagcgcaggttctacctcggtgaagttctggtattccgccgtagggatcttatggcgggccaggaaatctttggtaaacgctttactgccttccagttgggccgcacctgcggttgggccgaagattttcagcccggcggcgcggaaggtatcgaccacgcctttcaccagcggcgcttccgggccgacgatggtcagatcaatcttttcgttttgtgcgaaatccaacagcgccgggatatcggtcacgccaatagcaacgttttgcagcgcgggttccagtgcagtgcctgcattacccggagcaacaaaaacagtctcaaccagcgggctctgggccgctttccaggccagcgcgtgctcgcgcccgccgttaccaatcactaatactttcatctattgctccattaatggcggaagtggcgcatgtcggtgaagagcatcgcaataccgtgctcgtcggcggcggcaatcacttcgtcatcacggatagaaccgccaggctggattacgcaggtcacgcccgcagcggcggcggcatcaataccgtcgcggaacgggaagaacgcgtcagaagccatgctggaacctttcacttccaggccttcatcggccgctttaataccggcgatttttgcggagtacacgcggctcatctggcccgcgccaatgccgatagtcatattgtttttggcatagacgatagcgttggatttcacaaacttcgccaccttccagcagaacagcgcatcacgcagttcctgttcgctcggctgacgtttggtcaccacgcgcagttcttccgcaccgaccatccccaggtcacgatcctgaaccagcagaccgccgttcacgcgtttgaaatcgaggcccggaacacgctcgccccactgaccgcaggtcagaacgcgtacgttctgtttggcggcggtgattttcagggcttcttcgctggcggacggcgcaataatcacttcgacaaactgacgagaaatgatggcctgtgcggtttccgcatccagctcgcggttaaaggcaatgatgccgccgaatgcggaggttgggtcggttttgtacgcgcgatcgtaagcatcaagaatggaattgccgatagccacgccgcaagggttggcgtgcttcacaatcacacatgccggctcggcgaactctttcacgcactccagcgccgcatcggtatcggcgatgttgttataagagagggctttaccctgaacctgggttgcggtagcaacggaggcttctttcacattctcttctatatagaaggcagcctgctggtggctgttctcgccgtaacgcatatccagcttcttaatgaagttcaggttcagcgtgcgtgggaagcgaccggcggcttctttgctttcaccgtggtaagccggaaccatgctgccgaagtagttggcaatcatgctgtcgtaggcggcagtgtgttcgaaggctttgatggcgaggtcgaaacgggttgcaagcgtcaggcttccttcgttgtcatccatctctttaataatggcgtcatagtcgctgctcttcaccacgattgcgacatctttatggttcttggcggcggagcgcaccatcgttgggccgccgatatcgatgttctcaaccgcatcttccaggctgcaaccttcacgggccacggtctgggcgaacggatacaggttaacaaccaccatatcgataggctggatctgatgttcttccataatggcatcgtcctggccgcgacggcccagaatgccaccatgtactttcggatgcagggtcttcacgcgtccatccatcatctccgggaaaccggtgtaatcggaaacttcggttaccggcagacctttttctgctaacagacgggcagtgccccctgtagacagcagctccacaccgcgtgcggaaagtgcctgggcgaattcgacgataccggctttgtcagaaacactgagcagagcgcggcggactggacgacgttgttgcatggtaaatcccctggatttgactattacagagagcgttagctgaatttttcgcgaaaaactcagctaacgcccctaacggggcatccttatttttcgcccgcattgtaacgaaaacgtttgcgcaacgctcgcgaatttttctctttcaatggtgatcacaattttgactgtggttaccgtgggcaaaatacagaaattacattgatgattgtggataactctgtgcgtaaaaaggtataaagcgggcttttgctggggaatgcagcagtcagtcatttttctgcaatttttctattgcggcctgcggagaactccctataatgcgcctccatcgacacggcggatgtgaatcacttcacacaaacagccggttcggttgaagagaaaaatcctgaaattcagggttgactctgaaagaggaaagcgtaatatacgccacctcgcgacagtgcgctaaagcgcgtcgcaactgctctttaacaatttatcagacaatctgtgtgggcactcgaagatacggattcttaacgtcgcaagacgaaaaatgaataccaagtctcaagagtgaacacgtaattcattacgaagtttaattctttgagcatcaaacttttaaattgaagagtttgatcatggctcagattgaacgctggcggcaggcctaacacatgcaagtcgaacggtaacaggaagaagcttgcttctttgctgacgagtggcggacgggtgagtaatgtctgggaaactgcctgatggagggggataactactggaaacggtagctaataccgcataacgtcgcaagaccaaagagggggaccttcgggcctcttgccatcggatgtgcccagatgggattagctagtaggtggggtaacggctcacctaggcgacgatccctagctggtctgagaggatgaccagccacactggaactgagacacggtccagactcctacgggaggcagcagtggggaatattgcacaatgggcgcaagcctgatgcagccatgccgcgtgtatgaagaaggccttcgggttgtaaagtactttcagcggggaggaagggagtaaagttaatacctttgctcattgacgttacccgcagaagaagcaccggctaactccgtgccagcagccgcggtaatacggagggtgcaagcgttaatcggaattactgggcgtaaagcgcacgcaggcggtttgttaagtcagatgtgaaatccccgggctcaacctgggaactgcatctgatactggcaagcttgagtctcgtagaggggggtagaattccaggtgtagcggtgaaatgcgtagagatctggaggaataccggtggcgaaggcggccccctggacgaagactgacgctcaggtgcgaaagcgtggggagcaaacaggattagataccctggtagtccacgccgtaaacgatgtcgacttggaggttgtgcccttgaggcgtggcttccggagctaacgcgttaagtcgaccgcctggggagtacggccgcaaggttaaaactcaaatgaattgacgggggcccgcacaagcggtggagcatgtggtttaattcgatgcaacgcgaagaaccttacctggtcttgacatccacggaagttttcagagatgagaatgtgccttcgggaaccgtgagacaggtgctgcatggctgtcgtcagctcgtgttgtgaaatgttgggttaagtcccgcaacgagcgcaacccttatcctttgttgccagcggtccggccgggaactcaaaggagactgccagtgataaactggaggaaggtggggatgacgtcaagtcatcatggcccttacgaccagggctacacacgtgctacaatggcgcatacaaagagaagcgacctcgcgagagcaagcggacctcataaagtgcgtcgtagtccggattggagtctgcaactcgactccatgaagtcggaatcgctagtaatcgtggatcagaatgccacggtgaatacgttcccgggccttgtacacaccgcccgtcacaccatgggagtgggttgcaaaagaagtaggtagcttaaccttcgggagggcgcttaccactttgtgattcatgactggggtgaagtcgtaacaaggtaaccgtaggggaacctgcggttggatcacctccttaccttaaagaagcgttctttgcagtgctcacacagattgtctgatagaaagtgaaaagcaaggcgtcttgcgaagcagactgatacgtccccttcgtctagaggcccaggacaccgccctttcacggcggtaacaggggttcgaatcccctaggggacgccacttgctggtttgtgagtgaaagtcacctgccttaatatctcaaaactcatcttcgggtgatgtttgagatatttgctctttaaaaatctggatcaagctgaaaattgaaacactgaacaacgaaagttgttcgtgagtctctcaaattttcgcaacacgatgatgaatcgtaagaaacatcttcgggttgtgaggttaagcgactaagcgtacacggtggatgccctggcagtcagaggcgatgaaggacgtgctaatctgcgataagcgtcggtaaggtgatatgaaccgttataaccggcgatttccgaatggggaaacccagtgtgtttcgacacactatcattaactgaatccataggttaatgaggcgaaccgggggaactgaaacatctaagtaccccgaggaaaagaaatcaaccgagattcccccagtagcggcgagcgaacggggagcagcccagagcctgaatcagtgtgtgtgttagtggaagcgtctggaaaggcgcgcgatacagggtgacagccccgtacacaaaaatgcacatgctgtgagctcgatgagtagggcgggacacgtggtatcctgtctgaatatggggggaccatcctccaaggctaaatactcctgactgaccgatagtgaaccagtaccgtgagggaaaggcgaaaagaaccccggcgaggggagtgaaaaagaacctgaaaccgtgtacgtacaagcagtgggagcacgcttaggcgtgtgactgcgtaccttttgtataatgggtcagcgacttatattctgtagcaaggttaaccgaataggggagccgaagggaaaccgagtcttaactgggcgttaagttgcagggtatagacccgaaacccggtgatctagccatgggcaggttgaaggttgggtaacactaactggaggaccgaaccgactaatgttgaaaaattagcggatgacttgtggctgggggtgaaaggccaatcaaaccgggagatagctggttctccccgaaagctatttaggtagcgcctcgtgaattcatctccgggggtagagcactgtttcggcaagggggtcatcccgacttaccaacccgatgcaaactgcgaataccggagaatgttatcacgggagacacacggcgggtgctaacgtccgtcgtgaagagggaaacaacccagaccgccagctaaggtcccaaagtcatggttaagtgggaaacgatgtgggaaggcccagacagccaggatgttggcttagaagcagccatcatttaaagaaagcgtaatagctcactggtcgagtcggcctgcgcggaagatgtaacggggctaaaccatgcaccgaagctgcggcagcgacgcttatgcgttgttgggtaggggagcgttctgtaagcctgcgaaggtgtgctgtgaggcatgctggaggtatcagaagtgcgaatgctgacataagtaacgataaagcgggtgaaaagcccgctcgccggaagaccaagggttcctgtccaacgttaatcggggcagggtgagtcgacccctaaggcgaggccgaaaggcgtagtcgatgggaaacaggttaatattcctgtacttggtgttactgcgaaggggggacggagaaggctatgttggccgggcgacggttgtcccggtttaagcgtgtaggctggttttccaggcaaatccggaaaatcaaggctgaggcgtgatgacgaggcactacggtgctgaagcaacaaatgccctgcttccaggaaaagcctctaagcatcaggtaacatcaaatcgtaccccaaaccgacacaggtggtcaggtagagaataccaaggcgcttgagagaactcgggtgaaggaactaggcaaaatggtgccgtaacttcgggagaaggcacgctgatatgtaggtgaggtccctcgcggatggagctgaaatcagtcgaagataccagctggctgcaactgtttattaaaaacacagcactgtgcaaacacgaaagtggacgtatacggtgtgacgcctgcccggtgccggaaggttaattgatggggttagcgcaagcgaagctcttgatcgaagccccggtaaacggcggccgtaactataacggtcctaaggtagcgaaattccttgtcgggtaagttccgacctgcacgaatggcgtaatgatggccaggctgtctccacccgagactcagtgaaattgaactcgctgtgaagatgcagtgtacccgcggcaagacggaaagaccccgtgaacctttactatagcttgacactgaacattgagccttgatgtgtaggataggtgggaggctttgaagtgtggacgccagtctgcatggagccgaccttgaaataccaccctttaatgtttgatgttctaacgttgacccgtaatccgggttgcggacagtgtctggtgggtagtttgactggggcggtctcctcctaaagagtaacggaggagcacgaaggttggctaatcctggtcggacatcaggaggttagtgcaatggcataagccagcttgactgcgagcgtgacggcgcgagcaggtgcgaaagcaggtcatagtgatccggtggttctgaatggaagggccatcgctcaacggataaaaggtactccggggataacaggctgataccgcccaagagttcatatcgacggcggtgtttggcacctcgatgtcggctcatcacatcctggggctgaagtaggtcccaagggtatggctgttcgccatttaaagtggtacgcgagctgggtttagaacgtcgtgagacagttcggtccctatctgccgtgggcgctggagaactgaggggggctgctcctagtacgagaggaccggagtggacgcatcactggtgttcgggttgtcatgccaatggcactgcccggtagctaaatgcggaagagataagtgctgaaagcatctaagcacgaaacttgccccgagatgagttctccctgactccttgagagtcctgaaggaacgttgaagacgacgacgttgataggccgggtgtgtaagcgcagcgatgcgttgagctaaccggtactaatgaaccgtgaggcttaaccttacaacgccgaaggtgttttggcggattgagagaagattttcagcctgatacagattaaatcagaacgcagaagcggtctgataaaacagaatttgcctggcggcagtagcgcggtggtcccacctgaccccatgccgaactcagaagtgaaacgccgtagcgccgatggtagtgtggggtctccccatgcgagagtagggaactgccaggcatcaaattagaaaaaccccggtccataaggccggggttttttgcatatcaattatttgcatgatgaagggaatctcatgagtgttctgtatatccaaattcgtcgtaatcaaattactgttcgcgatcttgaaagcaaacgtgaagtgagtggagacgctgccttcagtaaccagcgcctgttaatcgccaatttctttgttgcagaaaaagttctgcaagatcttgttctgcaactccacccacgtagtacctggcattcttttttgccagcaaaacgtatggatattgttgtgagcgcactggaaatgaatgagggcggtttgagtcaggttgaggaacgcattctccatgaagtggtcgctggggcaacgttaatgaaatatcgccagttccacatccatgcgcaaagtgcggtactcagtgatagtgcggtcatggcaatgcttaagcagaaataatcgtgtcaccattggtgggtactaaacctgaagttcagcccaccgggatgagaaaaaatcgcttacgcccccacatacgccagattcagcaacggatacggtttccccaaatcgtccacctcagagcgtcccgtaaccttaaaacccaccttcttatagaacccaaccgcctgctcattttgctcattaacgttggttgtcagttccggtgccatgctgagcgcatgctccaccagcacccgacctacgccgcagccgcgcacatcaggatcgataaacagcgcatccatatgctgcccacttagcaacataaatccaaccggctgatcccgctcattaaccgcgacccacaacggcgcttccggcaggaaggaacgaactaggtcctccagctcggtccgatactctgcacttagaaaatcgtgagtggcatcgacagaacgacaccaaatcgcaacgagttcctccccttcctcatgccgactgcggcgaatactaataaccattttctctccttttagtcattcttatattctaacgtagtcttttccttgaaactttctcaccttcaacatgcaggctcgacattggcaaattttctggttatcttcagctatctggatgtctaaacgtataagcgtatgtagtgaggtaatcaggttatgccgattcgtgtgccggacgagctacccgccgtcaatttcttgcgtgaagaaaacgtctttgtgatgacaacttctcgtgcgtctggtcaggaaattcgtccacttaaggttctgatccttaacctgatgccgaagaagattgaaactgaaaatcagtttctgcgcctgcttagtaacagtcctttgcaggtcgatattcagctgttgcgcatcgattcccgtgaaagccgcaacacgcccgcagagcatctgaacaacttctactgtaactttgaagatattcaggatcagaactttgacggtttgattgtaactggtgcgccgctgggcctggtggagtttaatgatgtcgcttactggccgcagatcaaacaggtgctggagtggagcaaagatcacgtcaccagcacgctgtttgtctgctgggcggtacaggccgcgctcaatatcctctacggcattcctaagcaaactcgcaccgaaaaactctctggcgtttacgagcatcatattctccatcctcatgcgcttctgacgcgtggctttgatgatagtttcctggcaccgcatagccgctatgctgactttccggcagcgttgattcgtgattacaccgatctggaaattctggcagagacggaagaaggggatgcatatctgtttgccagtaaagataagcgcattgcctttgtgacgggccatcccgaatatgatgcgcaaacgctggcgcaggaatttttccgcgatgtggaagccggactagacccggatgtaccgtataactatttcccgcacaatgatccgcaaaatacaccgcgagcgagctggcgtagtcacggtaatttactgtttaccaactggctcaactattacgtctaccagatcacgccatacgatctacggcacatgaatccaacgctggattaatcttctgtgatagtcgatcgttaagcgattcagcaccttacctcaggcaccttcgggtgccttttttatttccgaaacgtacctcagcaggtgaataaattttattcatattgttatcaacaagttatcaagtatttttaattaaaatggaaattgtttttgattttgcattttaaatgagtagtcttagttgtgctgaacgaaaagagcacaacgatccttcgttcacagtggggaagttttcggatccatgacgaggagctgcacgatgactgaacaggcaacaacaaccgatgaactggctttcacaaggccgtatggcgagcaggagaagcaaattcttactgccgaagcggtagaatttctgactgagctggtgacgcattttacgccacaacgcaataaacttctggcagcgcgcattcagcagcagcaagatattgataacggaacgttgcctgattttattagcgaaacagcttccattcgcgatgctgattggaaaattcgcgggattcctgcggacttagaagaccgccgcgtagagataactggcccggtagagcgcaagatggtgatcaacgcgctcaacgccaatgtgaaagtctttatggccgatttcgaagatagtctggcaccagactggaacaaagtgatcgacgggcaaattaacctgcgtgatgcggttaacggcaccatcagttacaccaatgaagcaggcaaaatttaccagctcaagcccaatccagcggttttgatttgtcgggtacgcggtctgcacttgccggaaaaacatgtcacctggcgtggtgaggcaatccccggcagcctgtttgattttgcgctctatttcttccacaactatcaggcactgttggcaaagggcagtggtccctatttctatctgccgaaaacccagtcctggcaggaagcggcctggtggagcgaagtcttcagctatgcagaagatcgctttaatctgccgcgcggcaccatcaaggcgacgttgctgattgaaacgctgcccgccgtgttccagatggatgaaatccttcacgcgctgcgtgaccatattgttggtctgaactgcggtcgttgggattacatcttcagctatatcaaaacgttgaaaaactatcccgatcgcgtcctgccagacagacaggcagtgacgatggataaaccattcctgaatgcttacagtcgcctgttgattaaaacctgccataaacgcggtgcttttgcgatgggcggcatggcggcgtttattccgagcaaagatgaagagcacaataaccaggtgctcaacaaagtaaaagcggataaaagcctggaagccaataacggtcacgatggcacatggatcgctcacccaggccttgcggacacggcaatggcggtattcaacgacattctcggctcccgtaaaaatcagcttgaagtgatgcgcgaacaagacgcgccgattactgccgatcagctgctggcaccttgtgatggtgaacgcaccgaagaaggtatgcgcgccaacattcgcgtggctgtgcagtacatcgaagcgtggatctctggcaacggctgtgtgccgatttatggcctgatggaagatgcggcgacggctgaaatttcccgtaccagcatctggcagtggatccatcatcaaaaaacgttgagcaatggcaaaccggtgaccaaagccttgttccgccagatgctgggcgaagagatgaaagtcattgccagcgaactgggcgaagaacgtttctcccaggggcgttttgacgatgccgcacgcttgatggaacagatcaccacttccgatgagttaattgatttcctgaccctgccaggctaccgcctgttagcgtaaaccaccacataactatggagcatctgcacatgaaaacccgtacacaacaaattgaagaattacagaaagagtggactcaaccgcgttgggaaggcattactcgcccatacagtgcggaagatgtggtgaaattacgcggtagtgtcaatcctgaatgcacgctggcgcaactgggcgcagcgaaaatgtggcgtctgctgcacggtgagagcaaaaaaggctacatcaacagcctcggcgcactgactggcggtcaggcgctgcaacaggcgaaagcgggtattgaagcagtctatctgagcggatggcaggtagcggcggacgctaacctggcggccagcatgtatccggatcagagcctctatccggcaaacagcgtgccagctgtggtggagcggatcaacaacaccttccgtcgtgccgatcagatccaatggtccgcgggcattgagccgggcgatccgcgctatgtcgattacttcctgccgatcgttgccgatgcggaagccggttttggcggtgtcctgaatgcctttgaactgatgaaagcgatgattgaagccggtgcagcggcagttcacttcgaagatcagctggcgagtgtgaagaaatgcggtcacatgggcggcaaagttttagtgccaactcaggaagctattcagaaactggtcgcggcgcgtctggcagctgacgtgacgggcgttccaaccctgctggttgcccgtaccgatgctgatgcggcggatctgatcacctccgattgcgacccgtatgacagcgaatttattaccggcgagcgtaccagtgaaggcttcttccgtactcatgcgggcattgagcaagcgatcagccgtggcctggcgtatgcgccatatgctgacctggtctggtgtgaaacctccacgccggatctggaactggcgcgtcgctttgcacaagctatccacgcgaaatatccgggcaaactgctggcttataactgcagcccgagcttcaactggcagaaaaacctcgacgacaaaactattgccagcttccagcagcagctgagcgatatgggctacaagttccagttcatcaccctggcaggtatccacagcatgtggttcaacatgtttgacctggcaaacgcctatgcccagggcgagggtatgaagcactacgttgagaaagtgcagcagccggaatttgccgccgcgaaagatggctataccttcgtatctcaccagcaggaagtgggtacaggttacttcgataaagtgacgactattattcagggcggcacgtctagtgtcaccgcgctgaccggctccactgaagaaagccagttctaagcaacaacaaccgttgctgactgtaggccggataaggcgttcacgccgcatccggcaatcggtgcacgatgcctgatgcgacgcttgcgcgtcttatcatgcctacagccgttgccgaacgtaggctggataaggcgtttacgccgcatccggcaattctctgctcctgatgagggcgctaaatgccgcgtggcctggaattattgattgctcaaaccattttgcaaggcttcgatgctcagtatggtcgattcctcgaagtgacctccggtgcgcagcagcgtttcgaacaggccgactggcatgctgtccagcaggcgatgaaaaaccgtatccatctttacgatcatcacgttggtctggtcgtggagcaactgcgctgcattactaacggccaaagtacggacgcggcatttttactacgtgttaaagagcattacacccggctgttgccggattacccgcgcttcgagattgcggagagcttttttaactccgtgtactgtcggttatttgaccaccgcagccttactcccgagcggctttttatctttagctctcagccagagcgccgctttcgtaccattccccgcccgctggcgaaagactttcaccccgatcacggctgggaatctctactgatgcgcgttatcagcgacctaccgctgcgcctgcgctggcagaataaaagccgtgacatccattacattattcgccatctgacggaaacgctggggacagacaacctcgcggaaagtcatttacaggtggcgaacgaactgttttaccgcaataaagccgcctggctggtaggcaaactgatcacaccttccggcacattgccatttttgctgccgatccaccagacggacgacggcgagttatttattgatacctgcctgacgacgaccgccgaagcgagcattgtttttggctttgcgcgttcttattttatggtttatgcgccgctgcccgcagcgctggtcgagtggctacgggaaattctgccaggtaaaaccaccgctgaattgtatatggctatcggctgccagaagcacgccaaaaccgaaagctaccgcgaatatctcgtttatctacagggctgtaatgagcagttcattgaagcgccgggtattcgtggaatggtgatgttggtgtttacgctgccgggctttgatcgggtattcaaagtcatcaaagacaggttcgcgccgcagaaagagatgtctgccgctcacgttcgtgcctgctatcaactggtgaaagagcacgatcgcgtgggccgaatggcggacacccaggagtttgaaaactttgtgctggagaagcggcatatttccccggcattaatggaattactgcttcaggaagcagcggaaaaaatcaccgatctcggcgaacaaattgtgattcgccatctttatattgagcggcggatggtgccgctcaatatctggctggaacaagtggaaggtcagcagttgcgcgacgccattgaagaatacggtaacgctattcgccagcttgccgctgctaacattttccctggcgacatgctgtttaaaaacttcggtgtcacccgtcacgggcgtgtggttttttatgattacgatgaaatttgctacatgacggaagtgaatttccgcgacatcccgccgccgcgctatccggaagacgaacttgccagcgaaccgtggtacagcgtcagcccgggcgatgttttcccggaagagtttcgccactggctatgcgccgacccgcgtattggtccgctgtttgaagagatgcacgccgacctgttccgcgctgattactggcgcgcactacaaaaccgcatacgtgaagggcatgtggaagatgtttatgcgtatcggcgcaggcaaagatttagcgtacggtatggggagatgcttttttgagtaaagcttccatataatttttctccgcaatgtatcgagggttatccgtaaagccaaagctttcagccatcttatttaatgtattaaggattaattcagcaataacccggtgaccaaattcaaaagccaactcaaaggcagagtatttttgtggggctttgtgttgccaaaaatccataatatcttcagcggtaaatccaaacaggcgtgcatggtcagataaagcaagataaaccgtctctacaacattttgttgtttatgctgtatcgcactaaacaaaccgggatattcattagaattatttgccaggaggaggggcttcatattttttttatcgaatttaaacgtattaaacagagtgggtaatgcgttaaaaatagtattaataacgttcatgtgtccgcgctgcatggccataaacaaacccgtgtcgcgcgcaagacttttagcggtcagaagatctacaatatcggaagcactaatgttaatttcctgggctaggctgggcaatgcttcaagaataactttcacgatatcgctatgtccattttgcatcgccagatatagtcctgggcaaccataaaaatcctttgccttcaggagatcgagtacctgttctttagtcaaatgacatgtgcgaattaacaaaggtaacgcgttcaaaacaattttcagcatgtcggcatcaccattcgccataacatggtataaaacatggctggacgttctatttttggcactcaggaatttatacacttgttcgttatctaaatgatgtgttgcggccagtttaggtaaggcgttcagaatgctggttacaacatttttatccttacgacttatcgctaaaaataatccagaaaaaccatttttatcttttgcctccagaatatgcatgagattttttttgctgagtaatccttcatatcctgtttcactcaaactattgaaaatagtctcaacgatatccgcattaccataatttatagccaaatataaacctggcaggttaatactattataggcagtcaacatttctgttctatgtagttctggcattttctggagttgaatcatcagttgcgtaagttggtgattctgaccaattgccattagcaaattcatcgttgcaggacttaatggaggggttatttcatccacagatccttttaacatcaatagctgttctttcggaagtgctggaattattgcaacagattgattaataacatgatcattactccatttcaggaggctataatctacattcataaaatccatcagagaatagtgtttaatattctctttgctttcgctcataattcttattttatcgttagttacattaggatcataaacgctaaccacgtaatgggtacatccttcagttgtgttctttattcttagccggaccgtcaaagcatggttatccaccagtaatatggctgccataacactgatgccattactttccatcttgtcaaaatatgctttcataactagcccgaaatcaccgcaggcagcaacgcaacgcccctcaggacggctggaaaccaacgccaaagtctggtttttgcattttttgttgaagtgcgtgagaaatttttcagcactagagtaatcatcttgatggggtttgtaatcaacattctgataaatatcattaatatattgtgcagcaatgtgtcggcatactatacggttttggggtcgccccggaaaataacattgaccattaagtttaattcttgggaattctttttcttttctatcactttttaggtttaattcttgtttatcaagagtgtcactgcgttgaggtaaaatttccattaggtatttttcaaatattggggcaatggtttgagtaagtgtcgtgttttcgtttttattaattatcgtaatttctttcttatcagcttgtaagacggacgtggaaaatttaatgacaaaatccttgttgctaaagatatgacgaccattttgtctacagttctcactgaagctttttaatagaggcgtcgccagctccttgccagaaaatttatcctcgagttctttataaaacaattcactcagggtttggtgttcatttgtctgggctgtattattaatatttgcagagaaagaactacgaggaatacgagtaatcatttaaatatctcattgtttattgatgtcttgaattttaactatcagaacagtgaaaaaatttaatatgattacaactaaagaaatatcataaatcgctcaatctcataatgcagccgtaaaagtttcggtggaatgagatcttgcgattttgttaataattaagtggtttgatgtttaaaaataatgctgagttaataaaagtgtgtgaagtgtatgacattaagttattttggcgtcaatgcgattaacagacacccttattctattgccactcaggtatgatgggcagaatattgcctctgcccgccagaaaaagtcagcgcattccaccgtacgccagcgtcacttccttcgccgctttaatcaccatcgcgccaaactcggtcacgcggtcatcggtaatacgactaatcggtccggaaatagaaattgcggcaaacggttcacggtgctcatcgaaaatacacgctgcaaggcaacgtagccccagtgcatgttcctcatcgtcaaaactataaccccgtttgcgcgtttgggcgagatcttcttttaaatgcacaggagacaccagcgttgcgtgggtataggcatgtaaccctttgcggtgcagcagcttcgtcacctgttcttcgctcagttgggctaaaaaggctttacccgcaccggaagcgtgcatcggcaatttaccgccgataggcgcggacattcgcatcagatgcgtacactgtacctggtcgataataatcgcttcgtgatcgctttgatcaagcaccgccatattgaccgtttcgccagactcttccattagattgcgcaggatagggtgaacaatcgctaacaaattacggctctggagaaagctgctgccgaccataaaggcatgtgcgccgattgcccaatgtcccagttcgccaacctgacgcacgaaaccctgctgttgcatcgtggttagcaggcggtgggtcgtggaattgggtaacccggcttgttgcgccagttccgtgagtgccacactgccattggattcggcaatccactccagtaatttcaggccacgcgttaaagactgaacctgtccagtcgctggtgcggtggcaacggcgggttttctgccgcgtttcgcgggaatgggtgcgaccatgacagtctcttttttctgtatcgtggaaatcattttcatttttattgttagctaatgcaatagttactgaactgatccgatgagttaatgttgaacaaatctcatgttgcgtggtggtcgcttttaccacagatgcgtttatgccagtatggtttgttgaatttttattaaatctgggttgagcgtgtcgggagcaagtgtgagcagcaaagtggaacaactgcgtgcgcagttaaatgaacgtattctggtgctggacggcggtatgggcaccatgatccagagttatcgactgaacgaagccgattttcgtggtgaacgctttgccgactggccatgcgacctcaaaggcaacaacgacctgctggtactcagtaaaccggaagtgatcgccgctatccacaacgcctactttgaagcgggcgcggatatcatcgaaaccaacaccttcaactccacgaccattgcgatggcggattaccagatggaatccctgagcgcggaaatcaactttgcggcggcgaaactggcgcgagcttgtgctgacgagtggaccgcgcgcacgccagagaaaccgcgctacgttgccggtgttctcggcccgaccaaccgcacggcgtctatttctccggacgtcaacgatccggcatttcgtaatatcacttttgacgggctggtggcggcttatcgagagtccaccaaagcgctggtggaaggtggcgcggatctgatcctgattgaaaccgttttcgacacccttaacgccaaagcggcggtatttgcggtgaaaacggagtttgaagcgctgggcgttgagctgccgattatgatctccggcaccatcaccgacgcctccgggcgcacgctctccgggcagaccaccgaagcattttacaacagtttgcgccacgccgaagctctgacctttggcctgaactgtgcgctggggcccgatgaactgcgccagtacgtgcaggagctgagtcggattgcggaatgctacgtcaccgcgcacccgaacgccgggctacccaacgcctttggtgagtacgatctcgacgccgacacgatggcaaaacagatacgtgaatgggcgcaagcgggttttctcaatatcgtcggcggctgctgtggcaccacgccacaacatattgcagcgatgagtcgtgcagtagaaggattagcgccgcgcaaactgccggaaattcccgtagcctgccgtttgtccggcctggagccgctgaacattggcgaagatagcctgtttgtgaacgtgggtgaacgcaccaacgtcaccggttccgctaagttcaagcgcctgatcaaagaagagaaatacagcgaggcgctggatgtcgcgcgtcaacaggtggaaaacggcgcgcagattatcgatatcaacatggatgaagggatgctcgatgccgaagcggcgatggtgcgttttctcaatctgattgccggtgaaccggatatcgctcgcgtgccgattatgatcgactccagtaaatgggacgtcattgaaaaaggtctgaagtgtatccagggcaaaggcattgttaactctatcagcatgaaagagggcgtcgatgcctttatccatcacgcgaaattgttgcgtcgctacggtgcggcagtggtggtaatggcctttgacgaacagggacaggccgatactcgcgcacggaaaatcgagatttgccgtcgggcgtacaaaatcctcaccgaagaggttggcttcccgccagaagatatcatcttcgacccaaacatcttcgcggtcgcaactggcattgaagagcacaacaactacgcgcaggactttatcggcgcgtgtgaagacatcaaacgcgaactgccgcacgcgctgatttccggcggcgtatctaacgtttctttcagcttccgtggcaacgatccggtgcgcgaagccattcacgcagtgttcctctactacgctattcgcaatggcatggatatggggatcgtcaacgccgggcaactggcgatttacgacgacctacccgctgaactgcgcgacgcggtggaagatgtgattcttaatcgtcgcgacgatggcaccgagcgtttactggagcttgccgagaaatatcgcggcagcaaaaccgacgacaccgccaacgcccagcaggcggagtggcgcagctgggaagtgaataaacgtctggaatacagcctggtcaaaggcattaccgagtttatcgagcaggataccgaagaagcccgccagcaggctacgcgcccgattgaagtgattgaaggcccgttgatggacggcatgaatgtggtcggcgacctgtttggcgaagggaaaatgttcctgccacaggtggtcaaaagcgcgcgcgtcatgaaacaggcggtggcctacctcgaaccgtttattgaagccagcaaagagcagggcaaaaccaacggcaagatggtgatcgccaccgtgaagggcgacgtccacgacatcggtaaaaatatcgttggtgtggtgctgcaatgtaacaactacgaaattgtcgatctcggcgttatggtgcctgcggaaaaaattctccgtaccgctaaagaagtgaatgctgatctgattggccttagcgggcttatcacgccgagcctggacgagatggttaacgtggcgaaagagatggagcgtcagggcttcactattccgttactgattggcggcgcgacgaccagtaaagcgcacacggcggtgaaaatcgagcagaactacagcggcccgacggtgtatgtgcagaatgccagccgtaccgttggtgtggtggcggcgctgctttccgatacccagcgtgatgattttgtcgctcgtacccgcaaggagtacgaaaccgtacgtattcagcacgggcgcaagaaaccgcgcacaccaccggtcacgctggaagcggcgcgcgataacgatttcgcttttgactggcaggcttacacgccgccggtggcgcaccgtctcggcgtgcaggaagtcgaagccagcatcgaaacgctgcgtaattacatcgactggacaccgttctttatgacctggagcctggccgggaagtatccgcgcattctggaagatgaagtggtgggcgttgaggcgcagcggctgtttaaagacgccaacgacatgctggataaattaagcgccgagaaaacgctgaatccgcgtggcgtggtgggcctgttcccggcaaaccgtgtgggcgatgacattgaaatctaccgtgacgaaacgcgtacccatgtgatcaacgtcagccaccatctgcgtcaacagaccgaaaaaacaggcttcgctaactactgtctcgctgacttcgttgcgccgaagctttctggtaaagcagattacatcggcgcatttgccgtgactggcgggctggaagaggacgcactggctgatgcctttgaagcgcagcacgatgattacaacaaaatcatggtgaaagcgcttgccgaccgtttagccgaagcctttgcggagtatctccatgagcgtgtgcgtaaagtctactggggctatgcgccgaacgagaacctcagcaacgaagagctgatccgcgaaaactaccagggcatccgtccggcaccgggctatccggcctgcccggaacatacggaaaaagccaccatctgggagctgctggaagtggaaaaacacactggcatgaaactcacagaatctttcgccatgtggcccggtgcaagcgttagcggttggtacttcagccacccggacagcaagtactacgctgtagcacaaattcagcgcgatcaggttgaagattatgcccgccgtaaaggtatgagcgttaccgaagttgagcgctggctggcaccgaatctggggtatgacgcggactgattcacaaatctgtcacttttccttacaacaaacagggcgctcaatgagtgccctgtctctttattaatatgaaacacttatactggaaacaggctggaataatcttagccggaaaaacgaatgtcaaaaggcacagtaaagatgccagtcagcgtgtttccggtcctttggtcattcaattgcttcaggaacatataacgataaggagaacctgaactcgtgttaacgctgcttcacctgctttctgccgtcgccctgctggtctgggggactcatattgttcgaaccggcgtaatgcgcgtcttcggcgcgcgtttgcgtactgtccttagccggagcgtcgaaaaaaagccgctcgccttttgcgcggggatcggcgttaccgcactggtacagagcagtaatgccaccaccatgctggtgaccagctttgtcgctcaggatctggtagccctcgcaccggctctggtcattgtgctgggtgcagatgtcgggacggcgctaatggcgcgtattctcaccttcgacttatcctggctgagtccgttacttatttttatcggcgtgatttttttcctcggacgcaaacagagtcgcgccgggcaactgggccgcgtcggtattggtcttgggctgattttgctagcgctggagttgattgtgcaggccgtaacgccgatcacccaggcaaacggcgttcaggtgatctttgccagcctgaccggcgatattctgctggatgcgctgattggcgcgatgttcgccattatcagctactccagccttgctgctgtactgctgaccgcgactctgaccgccgcaggcattatctccttccccgtggcgctctgtctggtgattggtgctaacctcggttccggtctgctggcaatgctcaacaacagtgccgccaatgccgcagcccgccgtgtcgcgctgggtagtctgctgtttaagctggtgggtagcctgattatcctgccgtttgtccatttgctggcagagacaatggggaagttgagtttgccaaaagcggaactggtgatctatttccacgtcttctacaaccttgtacgttgcctggtcatgctgccatttgttgacccgatggcacggttttgcaaaacgattattcgcgatgaaccggaactggatacccagctacggcctaaacatctggatgtcagcgcgctggatacgcccacgcttgctctggcgaacgccgcgcgcgaaaccctgcgcattggcgacgccatggaacagatgatggaagggttgaataaagtgatgcacggtgagccacggcaggagaaagagctgcgtaagctggcagatgatatcaacgttctctacaccgccattaagctgtatctggcgcggatgccaaaagaagagctggcggaggaagagagccgccgctgggcagagatcatcgaaatgagcctcaaccttgaacaggcctccgatatcgtcgagcgcatgggcagcgaaattgctgacaaaagtctggcagcacggcgggcatttagccttgatgggttgaaggaactggatgcgctctatgagcaattgctcagtaatttaaagctggcaatgagcgtgttcttctctggcgatgtcaccagcgctcgtcgtttgcgtcgcagcaaacatcgttttcgcattcttaatcgccgctattcccacgcccacgtcgatcgcctgcatcagcaaaacgtgcagagcattgaaaccagtagcctacatttaggcttactgggagatatgcagcgcctgaacagcctgttttgtagcgtggcttacagtgtgctggaacagccggatgaagatgaaggacgggacgagtattaatattgtgaatcctgtaggcctgataagacgcgtcaagcgtcgcatcaggcactatgaacaagatgccggatcatgcatccggcaattcacttaaaaacggtgaccagcttccagcggaaccgcttcttcaccagccttaaacacataagtggtgttcgggccacccagcgtagcgtgacctttactcactgtgatccagttaccttccggtagaccaataatcgtcagttctggcgcgacgaccagcagttcgcgaatacgctgctcacgggtttcacctttatggccttccggcagcgcgttggtgaagtgcgggttgatttgcagcgggaacagatttagcgcatcgaaaccttgcggatcgacaatcggcatatcgttggtggtacgaatagttgggcaagcaaggttagcgcctgcgctccagccaatatacagagcgccacgtttaaccacgtcagtaattggtgccagcagcccgcgctcgcggcactgtttcagcaactggaaagtattcccgccgccgacaatcacgatctcagcattttcaatcgcggcaacgggatcgacaacgctatgaataccggtgacagaaacacccagcggagcgagaaccgcagccgttttcgctgtgtaatcatcccaggtctgcgttacgccagcgaaagggataaacaccgcactgcggcgaccctgcaactgttcagcaattagcggcagtgcatgttccagccaggctttacccggcagcgtgctgttactcaataaaagcagttccattacttctccggttagtaagaaatcacgggaggcatgctaccactgcgaatttaaccacttactgacatggctcacgatgtcgcacattgcttctggaaagtgatttgagcaggtaacgaattcaagccaatggaaataacaaatagttcgctcatgactattttttatcaacccaaaggtacggtatattccgttttttacaggagaatttatgctgcccgacagtagtgtccgtttaaataaatacatcagcgaaagcggaatttgcagtcgccgcgaagcggatcgctatatcgagcaaggcaatgtgttccttaatggcaagcgagccaccattggcgatcaggtgaaacccggcgacgttgtgaaagtaaacggtcagttgattgaacctcgggaagccgaagatttggtacttatcgccctgaacaagcccgttggtattgtaagcaccaccgaagatggcgagcgcgataacattgtcgatttcgttaaccacagcaaacgcgtgttcccgattggccgcctggataaagactcccaggggctgattttcctcaccaatcacggcgatctggtgaataagatcctgcgtgctggcaatgatcatgagaaagagtatctggtgacggtcgataaaccgattaccgaggagtttattcgcggcatgagtgcgggggtgccaatcctcgggacagtgaccaaaaagtgcaaagttaaaaaagaagcgccgtttgtcttccgcattaccctggtgcaggggctgaaccgtcagatccggcgcatgtgcgagcatttcggctatgaagtgaaaaagctggaacgcacgcgcatcatgaacgttagcttaagcggcattccgctgggggaatggcgcgatttaaccgacgatgagttaatcgacctctttaagctcattgaaaattcctcttccgaggtaaaacctaaagcgaaggccaaaccgaaaacagcgggcatcaaacgtccagtcgttaagatggaaaaaacggcggaaaaaggcggtcgcccggcgtccaacggtaagcgttttaccagcccggggcgtaaaaagaaggggcgctgattaacgcctcagactgatgaaaacggcccaaaagtgcccggacagtcccctcgccccttcgggaaaagggttagggtgaggggaaaattgtgttcacactgacgagtgaaaatctcaggcgttgattgtggattagcgcctgccgcgcgtgctcgtatttgcactccagctaaaactcgcttcaggatccggtttataagcctgctttttcttcaactggcgggcttttttcgcttcagcctcacgctcaaccattaatttatcgatgtaatctttcttaatgctgttggtttcggagttggtcaatacgcgaccatgcgcaatccgcgcccgatccagcagtgttttaagttcacgctgctcgcgttcagtcatctctttttgggtaatacgggggagtgccatgatggtgccctcagtgagccagagagttcagtgtacgggaattcgtttgcgagcagaactgataatattcattttgccttctcttaactatttatctctttcgataattaattagagatgcagataaaaaaattaaaggcaattattctccgataaagacgctggttaacagagtacaggctcgtttattgatgagcatagtgacaagaaaatcaatacggcccgaaatatagcttccaggccatacagtatttactcaaacaaattactatgcagtttttgcaccacctgctcggcatcttcgccgggcaccaggaagcacaggttatggctggatgcgccataacaaatcatgcgaatgttgaacggttccagtacgccgaatacctctttgccaacgccgcaggctttactcaggtcattgccaatcaacgcgaccagcgccagaccttcttccacctccacccgacacagtgcggaaagctccatcagcagagattgcgtcagcaacgtatcgccagtggaggtactaccggtggtatcaagggttaatgccacgctcacttcactcgtggtgattaagtctacgctaatattatgccgcgcgaggatgccgaaaacttccgcgaggaaaccgcgagaatgcagcatattcaggctgtgcaaagtgagcagagtctgattgcgacgaagcgccagagcgcggaacagcggcggattttcagttttattgcacaccagcgtaccacctgcgcgtgggtctttgctggagccgacaaagaccgggatatcgctgcgtactgcgggtagcaacgttgccggatgcagtacttttgcaccaaaagttgccatctctgccgcttcggcaaacgcgatttcatcaatgcgttttgctgcggaaactacgcgtggatcggtggtgtagatgcccgggacgtcggtccagatatcaacacgagatgcgtgtaaagcctccgccagcaaggctgccgtataatcgctgcctccacggccaagcgtcgttgtacgacctttattttcgctaccgataaatccctgggtgatcactaagccttcattgagacgtgggagcagctgcagcgcggccagttccgccagcgcggctatatctggctctgcacgaccaaatcggtcgttggtacgcatcactttacgtacatcaaaccactgtgcctgaacatcgcgttcgcgcaggatctcaacaaacagcagggtgctcatcagctcgccgtggctgaccagctcatctgtcagcgccggagacgttgccagcgccgccgcttctgccagaacagtaatgttctccagcagacgttcaatctcttcacggataacgttcgggtaacgcagacgttccagaatggcaaactggatgttgcggatagcgtcgagtttttcgaatcgctcgccaggttccagtccttcagctaaagcgaccagcagattagtgataccagcagaagcgctgaggacaactaaacgcacgttggcatcagaaagcacaatatcagcgctgcggttcatggcgtcaaaatcagctacgctggtaccgccaaatttggagacaacaatttcagacataactacctcgtgtcaggggatccattttcagccttggcacaagggaagagcggaagacgggtgggcgcagagcgatacttcgctactattttcacccagaagtgctccaccacttgcgaaacgcccgactgcgaacgcttctggtgacaacccaggggattcagcccctgtagccgatgatgaacgtggccagccgttcaatcacctcggcgatgcaccccctcaggtgttatcacaggactggctcctccaacaccgttacttgggcaacgcgcctcttctggcctgcgctagcgcaggtagtacatttataaataaagggtgagcggggcggttgtcaacgatggggtcatgcggatttttcatccactcctggcggtcagtagttcagctaataaatgcttcactgcgctaagggtttacactcaacattacgctaacggcactaaaaccatcacatttttctgtgactggcgctacaatcttccaaagtcacaattctcaaaatcagaagagtattgctaatgaaaaacatcaatccaacgcagaccgctgcctggcaggcactacagaaacacttcgatgaaatgaaagacgttacgatcgccgatctttttgctaaagacggcgatcgtttttctaagttctccgcaaccttcgacgatcagatgctggtggattactccaaaaaccgcatcactgaagagacgctggcgaaattacaggatctggcgaaagagtgcgatctggcgggcgcgattaagagcatgttctctggcgagaagatcaaccgcactgaaaaccgcgccgtgctgcacgtagcgctgcgtaaccgtagcaataccccgattttggttgatggcaaagacgtaatgccggaagtcaacgcggtgctggagaagatgaaaaccttcagtgaagcgattatttccggtgagtggaaaggttataccggcaaagcaatcactgacgtagtgaacatcgggatcggcggttctgacctcggcccatacatggtgaccgaagctctgcgtccgtacaaaaaccacctgaacatgcactttgtttctaacgtcgatgggactcacatcgcggaagtgctgaaaaaagtaaacccggaaaccacgctgttcttggtagcatctaaaaccttcaccactcaggaaactatgaccaacgcccatagcgcgcgtgactggttcctgaaagcggcaggtgatgaaaaacacgttgcaaaacactttgcggcgctttccaccaatgccaaagccgttggcgagtttggtattgatactgccaacatgttcgagttctgggactgggttggcggccgttactctttgtggagtgcgattggcctgagcattgttctctccatcggctttgataacttcgttgaactgctttccggcgcacacgcgatggacaagcatttctccaccacgcctgccgagaaaaacctgcctgtactgctggcgctgattggcatctggtacaacaatttctttggtgcggaaactgaagcgattctgccgtatgaccagtatatgcaccgtttcgcggcgtacttccagcagggcaatatggagtccaacggtaagtatgttgaccgtaacggtaacgttgtggattaccagactggcccgattatctggggtgaaccaggcactaacggtcagcacgcgttctaccagctgatccaccagggaaccaaaatggtaccgtgcgatttcatcgctccggctatcacccataacccgctctctgatcatcaccagaaactgctgtctaacttcttcgcccagaccgaagcgctggcgtttggtaaatcccgcgaagtggttgagcaggaatatcgtgatcagggtaaagatccggcaacgcttgactacgtggtgccgttcaaagtattcgaaggtaaccgcccgaccaactccatcctgctgcgtgaaatcactccgttcagcctgggtgcgttgattgcgctgtatgagcacaaaatctttactcagggcgtgatcctgaacatcttcaccttcgaccagtggggcgtggaactgggtaaacagctggcgaaccgtattctgccagagctgaaagatgataaagaaatcagcagccacgatagcagcaccaatggtctgattaaccgctataaagcgtggcgcggttaatcatcgtcgatatgtaggccggataaggcgttcacgccgcatccggcaaccgatgcctgatgcgacgcggtcgcgtcttatcaggcctacaggtcgatgccgatatgtacatcgtattcggcaattaatacatagcacgattgattaaataaccttaataacaatgccgacgttatgtcggcatttttttatcagataaatccccttgtctgtaatttaacggaaatcataccgtgaggttaatcctaaaatagatttttaatcgttgtttatttcggaaaatacgcagattaattgcttttgtttttattttaagtttatgatttttattgttatttaaatataagttgaaacttatatttgatattcattccaattatcctaaaacgccatcgctaattccccgcgccgtaattcgcatgctttagttgtgtatactcgatcccgcccgaaatgtttttgggtaaatctccattcattcaatgaagggaaattgttatgaaaaaagttctgtatggcatttttgccatatctgcgcttgcggcgacttctgcgtgggctgcacctgtacaggtgggcgaagcggcagggagcgcagcaacgagcgttagcgcggggagttcctccgcgaccagcgtcagcaccgtaagcagcgcggtgggtgtcgcgcttgcggcaaccggtggcggtgatggttctaataccgggaccaccacaaccacgaccaccagtacccagtaataaagtatgtatccccaaaataattcgagtcattgcatctgtggctagaagtatgaagggattaaccataaccacactccggtgtggttattctgcccctctggagaagagtcgtgaagcgacctgcactcattcttatctgcctgttattacaggcctgtagtgccacgactaaagagctgggcaatagtctgtgggacagtctgttcggcacgccaggcgtacagctgacggatgatgatattcaaaatatgccctacgccagccagtacatgcagcttaatggcgggccgcagttatttgtggtgctggccttcgctgaagacggacaacaaaaatgggtcactcaggatcaggctactctcgttacccaacatggccgtctggtgaagactctgctcggcggcgacaacctgattgaagtgaataaccttgctgccgacccgctgattaaacccgcacaaatcgttgatggcgcaagctggacgcgcacgatgggctggaccgagtaccagcaggtacgctacgccaccgcacgcagtgtcttcaaatgggatggcaccgataccgtcaaagtcggcagcgatgaaaccccggttcgcgtgctggacgaagaagtctccaccgaccaggcgcgctggcataaccgctattggatcgacagcgaagggcaaattcgccagagcgaacagtatctcggcgcggattattttccggtgaaaaccactctcatcaaggcggcaaaacaatgattaaacaaactattgtcgcgttgcttttgagtgtgggagcgagtagcgtcttcgcggcaggaaccgtcaaggtgttcagcaatggcagcagtgaggccaaaacgctaacgggcgcagagcatttaatcgatctggtaggccaaccgcggctggcaaacagctggtggcccggtgcggtgattagcgaagagctggcaacggcggcagcattgcgtcagcagcaggcgttgctgacacggctggcagaacagggcgcagattccagcgccgacgatgccgctgcgattaacgccttacgccagcaaattcaggcgttgaaagtgacgggcaggcaaaaaatcaatcttgatcccgatatcgtccgcgttgccgaacgcggtaacccgccgttgcagggcaactacacgctgtgggtcggaccaccgccgtccacggtcacgttgttcgggcttatcagccgtcctggcaagcagccattcactccaggtcgcgacgtggcgagctatctctctgaccagagcctgctcagcggtgcggatcgcagctacgcgtgggtggtttacccggacggacgcacgcaaaaagcgccggtggcttactggaacaagcgtcacgtagagccgatgcccggcagcattatttatgttggcctcgcggactccgtctggagtgagacgcctgatgcccttaacgccgacattcttcagactctgacgcagcggatacctcaataatgaaaaaaagacatctgcttagcttactggcgctgggcattagcacagcttgctacggcgaaacatatcctgcgcccattggtccgagccagagcgatttcggtggcgtaggattattacaaacgcccaccgcgcgtatggcacgggaaggggagttgagtctgaactatcgcgataacgatcagtaccgttattacagtgctagtgtgcaactcttcccgtggctggaaacaacgctgcgctacaccgacgtgcgcacccggcagtacagcagcgtcgaagcgttctctggcgatcaaacgtataaagataaagccttcgatctcaaactgcgtttgtgggaagagagttactggctgccgcaagtggcggttggtgcgcgggatatcggcggtacggggctgtttgatgcggaatatcttgttgccagcaaagcctgggggccgttcgattttacgctcggcctgggctgggggtatttgggcaccagcggtaatgtgaaaaatccgctctgtagtgccagtgataaatattgctatcgcgataacagctacaaacaggcgggatctatcgacggtagccagatgttccacggtcctgccagtctgtttggcggcgtggaataccagacgccctggcaaccgctgcgcctgaaactggagtatgaaggcaataattatcagcaggattttgccgggaagctggagcaaaaaagtaagtttaacgtcggtgcgatttatcgcgttaccgattgggccgacgttaaccttagctatgaacgtggcaacacctttatgtttggcgttacgttgcgcaccaactttaacgatctgcgcccgtcttacaacgataacgcccgcccgcaatatcaaccgcagccgcaggatgccattttgcagcatagcgtggtggcgaatcagttaacgctgttgaaatacaatgccggacttgccgatccacagatccaggcgaaaggcgatacgctgtatgttaccggcgagcaggtgaaatatcgtgatagccgcgaagggatcatccgtgcgaatcggatcgtgatgaacgatctgccggatgggatcaaaacgatccgcattacggaaaatcgccttaacatgccgcaggtgacgacggaaaccgatgtcgccagcctgaaaaatcatctcgccggagagccgttgggccacgaaacgacgctggcgcaaaaacgcgtcgagccagtggttccgcagtccaccgagcagggctggtatatcgacaaaagtcgctttgatttccatatcgatccggtgctgaaccagagcgtcggtggcccggaaaacttttacatgtatcagctgggcgtgatgggaacggcagatttgtggctgacggaccatctgctgaccaccggcagcctgtttgcaaatcttgccaacaactacgacaagtttaactacactaatcctccgcaggacagccacttaccgcgcgtgcgtacccatgtgcgcgagtatgtgcagaacgatgtctatgtgaataacctgcaagccaactacttccagcatctgggcaacggcttctacggtcaggtctacggtggttatctcgaaaccatgtttggcggtgcgggggcagaagtgttgtatcgcccgctggacagcaactgggcgtttggtctggatgccaactacgttaaacagcgcgactggcgtagtgcaaaagatatgatgaaattcaccgactacagcgtgaaaaccggacatctgaccgcctactggacgccatctttcgctcaggatgtgttagttaaagccagcgtcgggcagtatctggcaggggataaaggcggcacgctggagatcgccaaacgctttgatagcggcgtggtggtgggtggctatgccacgatcactaatgttagcaaagaggagtacggcgaaggggacttcaccaaaggcgtgtatgtcagcgtaccgttggatctcttcagctctggcccgacacgcagccgtgcggcgattggctggacgccgctgacgcgtgacggtggtcagcaacttgggcgtaagttccagttgtatgacatgaccagcgaccgtagcgtcaatttccgctaagtcatgggaaaggtgccagttttcgcactcactggcaccttcattcttaatggcctgtcgagccatcaggaacgcagttcactcccggtttgcgatctggtgtgtaaaggcgaaaacattctgtcttcctgtccgtcgatatcggttgcaggtctggttgcctgagcgactgggccatcattgggctggagacattgctttgcggtaggtcggctttatcagcagtaccgagcggaccagcataagcaggaagaacagagactgataacatcaaagcagcaaaataaggcttcatttttaccacctttatcaggttacgtttcatttgttccagaggaacattgtcgatttttcgcgcattgctggtggctgggaatcacctgaatgggtgatttttgaattaccggctttggtgcggtttgtcttgccggatgcgccgccaggcgcggcttatccggcctacgggtaggtatatccggctttggtggaggcgcgctccaaatccaggttgaacaaaacatacacaaaaaatatagatctccgtcacatttttgcgttatacaggaagctcgccactgtgaaggaggtactgctatgacgagtctctctcgtccgcgcgtggagtttatctccaccattttgcagaccgtactcaatcttggcctgctgtgcctcggcctgattttggttgtcttcctcggcaaagaaacggtgcatctggctgatgtgctgttcgcgccagaacaaaccagcaaatatgagctggtagaaggactggtggtttactttctctatttcgaatttatcgcgctgattgtgaagtactttcagtccggttttcacttcccgctacgttactttgtctatattgggatcaccgccattgtgcgcttgatcatcgtcgatcataaaagcccactggatgtgttgatctacagcgctgcgatcctgttactggtgatcaccctgtggctgtgtaatagcaaacggctgaagcgggagtaaaaagtcagcacgccgaaatggcgcggcgtgctggacaggaagattacagcgtagcagtttgttgtgttttcttcgtttccggttcccagagcgcttccagctcctcaagggttttacctttggtttccgggacaaatttccacataaacagtgctgccagaacgcccatacaaccgtaaatccagtaggagaaaccgttgtggaaatgggccaccagccaggagtttttgtccatcatcgggaaggtccaggagacgaagtagttcgccagccactgggccgccaccgcgattgccagcgctttaccacgaatagcattcgggaagatttcgctcagcagtacccagcataccggaccccaggacatggcaaaggcggcaacatagaacagcatgctcagtagcgccacaatacccggtgcctgagtgtaaaacgcggtaccgaggctaaacataccgattgccattccgagtgcgccgataatttgcagtggcttacgaccaaatttatccaccgtcataattgccagaacggtgaaggtgaggttgataactccgacaataatggtctgcaacagcgcgatatccgtgctggcccccagcgttttgaacacttccggcgcgtagtacagcaccacattgatgccgacaaattgctggaagatggagagcattacgccgattacaatcacgcccacgccaaacatcagcagacgaccaccggttttgcggccatgatccagggagtgtttaatttcctgtactgcctgagttgcaagcgtgttgcccataattttgcgcaggataccttccgcctgttcttgcttgccgcggctcatcagccagcgaggactttctggcacggtatacagcagcattaagaacagcagtgcagggatacattcgctggcaaacatataacgccagccgtcagtattcagccagctggcatcaccggaacgggcaataaaatagtttacgcagtaaactaaaagttgcccgaaaataatcgcaaactggttaaaagagaccagtttcccgcgaatatgagctggagccagttccgcaatatacattgggctgagcatactggctaaaccaacgccaataccgccaataatgcgataaataacaaattccgggacataacctgccagataaacaggcacagtgttgtccgggtttatagaggtaaaaccaagttctggccaggcagaacctacaccagaaataaaaaacaggacagcagcaatcttaagactatcacgacgaccgaagcggttactgcaataaccaccgagggcaccgccgatgatgcaaccaatcagagcgctggccacgcaaaaccctaacagggagttggcagcggattcacttaagttttgtggagcaacaaagacggtattgagactctcaacagtaccggaaataacggcggtgtcgtagccaaataataaaccacctaatgtagcgactaaggtaatgctaaatatataactggaattatactgggtattcattcagacctgccttagaccattctgatcttttatcagtgcattgatgttggaattgtcaggcagttaaggcaattatcattttttacaatgcgtttacgtaatgtcttttctgtgatcttaattgtgataattatccaaaattgataaaaacaatactattgccgtgactcagagcacgaaagagaattatcgtaagtgggaaaacaaataacgtaaaaataataagctctatgatggaaatattaaccggcgaacgattcagattgcagacgaaagaaaaaaaggcgctccgtggagcgccgaataacagtcacaagttgggataacgtaagttgagggtgcagcggcataacattggcagaacaacatctttaacctttcacaccacctgccgtcaggccgttgaccagccagcgttgagccagcaagaagacgatggtgatcggtaatgcagacatcacggcagcggcggcaaagtcaccccacaggtagttttgcgggttgaggtattgctgcatccccacggccagggtgtagctgtttacgtcacgcagtaacaggctcgcgaccggaacttcagtaatggcagcgataaagctcaggatgaataccaccgccagaatcggtacactcagcggcaacaggacaaggcggaaggcctgccacggtgtcgcaccatccagcgcagcagcttcttccaggctactgtcgatggtttcgaaatagcctttgatggtccagacatgcagcgcaatcccacccagatacgcgaaaattacgccgccgtgagtattcaggccaatgaatggaatgtactcacccagacgatcaaacaacgcatacaacgcgaccagactaagtactgccgggaacatctggaaaatcagcattcctttcagcagcgtcgctttgcctggaaagcgcatacgggcgaaagcgtaggcgcaggtggtggagagcgccacaatgccaatcgcggaaatcccggcgacctttacgctgttccacagccacagcagtaccgggaatggcggtggcgtaatgcgaccatcagcctgttcaacgctaaaacctaacgccagtttccagtgatcccaggagatttgctccgggatcaggctgccggtcgcaaagtttccctgacgcaggctgatagcgacgaccatcagcagcgggaacataatcgctgcgataaaaagtagcagtagcaggtgagtaataaataaacgagctttttggcttttcggttggaccattgccatttttgttatctcccttaatcaaacttcattcgcgtggctttcaggttcactatcgccagcgcacccaccagcaggaagatcagcgtggcaattgctgccgccagaccgaagtcctgacccccgccgccttcaaaagcgatgcggtaggtgtagttaacaagcaggtcggtataaccggctggcgtggtcgtgccaagacgatccgggccgccgttggttaacagttgaatcagcacgaagttgttaaagttaaaggcgaagctggcgatcatcagcggcgtcagcggtttaatcagcagcggcagcgtaatcttaaagaagttctggaacggacctgcgccatccattgcactggcttcatacaaatcgtccggaatcgctttcagcaagcccatgcagaggatcatcatgtacggataacccagccaggtattgacgataattagcatcgtgcgggcggtggtcggatcgctgaaccaggcgggcttcacgccaaacagcgcgctcaacatcatgttgatttcaccgaagctctggttaaacaaccctttgaaaatcaagatactaatgaagcttggcaccgcgtagggcagaatcagcaggacgcgatagaccgctttgccgcgcaacgcttcccactgcaccagacacgccagaaccatgccgaccgccaccgttaaaaagacagtgatcaggctgaacaccacggtccagacgaaaatggcgaggaacggtttctgaatgccttcgtcggtaaagacgcgggtaaagtttttccagccggtggtcacggtgtaaccggggcttagcttttcatcaccccagttgccgtcggcggtaatggactggtaaaagccaatttggttattcggacgatatttcacgccgctctgattattcgtcaacgtgccgtcaccgtcgagtgtgtagagcggctgcgtgccagaaaactggcgcagggagctcatcatcactttgttgccatccggcagaatggcggtaatgtcactcagcgcctgacgattctgggtaatcacgcgcagattcgcgcgttcgccttcgggctgggcggtcgtttctttcagttgcagtttttgctcgccgccaaatttaaaagcgtcggagaggtaatttttgccggtttcgccgtcgctgagcgccagttgccactcatcgcccgccgggtaaagaccaaagttataggttttgcctgcttgccaggagcgatctaacaacacttcctgcgcacgttcaaaagtcagctggttagtgctgctgtagttggtgaaggcaatggcgatggtgcagaccagagggaagaggacgaataatcccattccagccattcccgggtaaacatagcgccaggcgtaggctttacgattggcgaaaatatacagccccgcactactcaatatcagcgtggtaatggcgaacaggtattccccttgtgcgtacattaaaacaacaaggtaacccaccagcaggccgagcagacctagcacactccatttcagcgcgtcgctttgccaccaatgtttctttttaatgacatccatggggttcttcctcattccaggacggataaggctttcacgccttatccgacaacaactgcctgatgcgacgctgacgcgtcttatcaggcctacatacgtttcggttttgtaggccggacaaggcgttcacgccgcatccggcatttcacagcattacttggtgatacgagtctgcgcgtctttcagggcttcatcgacagtctgacgaccgctggcggcgttgatcaccgcagtacgcacggcataccagaaagcggacatctgcgggatgttcggcatgatttcacctttctgggcgttttccatggtggcggcaatacgtggatctttcgccaactcttcctcgtaagacttcagcgctacggcacccagcggtttgtctttattaaccgcttccagaccttcatcagtcagcagatagttttcgaggaactctttcgccagctctttgttcggactggcggcgttaatacctgcgctcagcacgccaacgaacggtttggatggttgacccttgaaggtcggcagtaccgttacaccataattcactttgctggtgtcgatgttggaccatgcccacgggccgttgatggtcatcgctgtttcgcctttattaaaggcagcttctgcgatggagtaatcggtgtctgcattcatgtgtttgtttttaatcaggtcaaccaggaaggtcagacccgctttcgcgccagcgttatccacgcccacgtctttaatgtcgtacttgccgttttcatacttgaacgcataacccccgtcagcagcaatcagcggccaggtgaagtacggttcttgcaggttgaacatcagcgcgctcttacctttcgctttcagttctttatccagcgccgggatctcttcccaggtttttggcgggttcggcagcagatctttgttataaatcaggcttaacgcttcaacagcgatcgggtaagcaatcagcttgccgttgtaacgtacggcatcccaggtaaacggatacagcttgtcctggaacgctttgtccggggtgatttcagccaacaggccagattgagcgtagccaccaaagcggtcgtgtgcccagaagataatgtcagggccatcgccagttgccgcaacctgtgggaatttctcttccagtttatccggatgctcaacggtgactttaattccggtatctttctcgaatttcttaccgacttcagcgagaccgttatagcctttatcgccgttaatccagattaccagtttaccttcttcgattttggcgagagcgctggcggaaaacatcatcgtcgttaatgcggataatgcgaggatgcgtgcacctgtttttattttcataatctatggtccttgttggtgaagtgctcgtgaaaacacctaaacggactctagtttctttatacggcaacctctttccatcctccttgcccctacgccccaccgtcgctttgtgtgatctctgttacagaattggcggtaatgtggagatgcgcacataaaatcgccacgatttttgcaagcaacatcacgaaattccttacatgacctcggtttagttcacagaagccgtgttctcatcctcccgcctcctcccccataaaaaagccagggggtggaggatttaagccatctcctgatgacgcatagtcagcccatcatgaatgttgctgtcgatgacaggttgttacaaagggagaagggcatggcgagcgtacagctgcaaaatgtaacgaaagcctggggcgaggtcgtggtaagcaaagatatcaatctcgatatccatgaaggtgaattcgtggtgtttgtcggaccgtctggctgcggtaaaagcactttactgcgcatgattgccgggcttgagacgatcaccagcggcgacctgttcatcggtgagaaacggatgaatgacactccgccagcagaacgcggcgttggtatggtgtttcagtcttacgcgctctatccccacctgagtgtagcagaaaacatgagttttggcctgaaactggctggcgcaaaaaaagaggtgattaaccaacgcgttaaccaggtggcggaagtgctacaactggcgcatttgctggatcgcaaaccgaaagcgctctccggtggtcagcgtcagcgtgtggcgattggccgtacgctggtggccgagccaagcgtatttttgctcgatgaaccgctctccaacctcgatgctgcactgcgtgtgcaaatgcgtatcgaaatctcccgtctgcataaacgcctgggccgcacaatgatttacgtcacccacgatcaggtcgaagcgatgacgctggccgacaaaatcgtggtgctggacgccggtcgcgtggcgcaggttgggaaaccgctggagctgtaccactatccggcagaccgttttgtcgccggatttatcggtagcccaaagatgaacttcctgccggtaaaagtgaccgccaccgcaatcgatcaagtgcaggtggagctgccgatgccaaatcgtcagcaagtctggctgccagttgaaagccgtgatgtccaggttggagccaatatgagcctgggtattcgcccggaacatctactgccgagtgatatcgctgacgtcatccttgagggtgaagttcaggtcgtcgagcaactcggcaacgaaactcaaatccatatccagatcccttccattcgtcaaaacctggtgtaccgccagaacgacgtggtgttggtagaagaaggtgccacattcgctatcggcctgccgccagagcgttgccatctgttccgtgaggatggcactgcatgtcgtcgactgcataaggagccgggcgtttaagcaccccacaaaacacacaaagcctgtcacaggtgatgtgaaaaaagaaaagcaatgactcaggagatagaatgatgattactctgcgcaaacttcctctggcggttgccgtcgcagcgggcgtaatgtctgctcaggcaatggctgttgatttccacggctatgcacgttccggtattggttggacaggtagcggcggtgaacaacagtgtttccagactaccggtgctcaaagtaaataccgtcttggcaacgaatgtgaaacttatgctgaattaaaattgggtcaggaagtgtggaaagagggcgataagagcttctatttcgacactaacgtggcctattccgtcgcacaacagaatgactgggaagctaccgatccggccttccgtgaagcaaacgtgcagggtaaaaacctgatcgaatggctgccaggctccaccatctgggcaggtaagcgcttctaccaacgtcatgacgttcatatgatcgacttctactactgggatatttctggtcctggtgccggtctggaaaacatcgatgttggcttcggtaaactctctctggcagcaacccgctcctctgaagctggtggttcttcctctttcgccagcaacaatatttatgactataccaacgaaaccgcgaacgacgttttcgatgtgcgtttagcgcagatggaaatcaacccgggcggcacattagaactgggtgtcgactacggtcgtgccaacttgcgtgataactatcgtctggttgatggcgcaagcaaagacggctggttattcactgctgaacatactcagagtgtcctgaagggctttaacaagtttgttgttcagtacgctactgacagcatgaccagccagggtaaagggctgagccagggttctggcgttgcatttgataacgaaaaatttgcctacaatatcaacaacaacggtcacatgctgcgtatcctcgaccacggtgcgatctccatgggcgacaactgggacatgatgtacgtgggtatgtaccaggatatcaactgggataacgacaacggcaccaagtggtggaccgtcggtattcgcccgatgtacaagtggacgccaatcatgagcaccgtgatggaaatcggctacgacaacgtcgaatcccagcgcaccggcgacaagaacaatcagtacaaaattaccctcgcacaacaatggcaggctggcgacagcatctggagtcgcccggctattcgtgtcttcgcaacctacgccaagtgggatgagaaatggggttacgactacaccggtaacgctgataacaacgcgaacttcggcaaagccgttcctgctgatttcaacggcggcagcttcggtcgtggcgacagcgacgagtggaccttcggtgcccagatggaaatctggtggtaatagcaaaacctgggccggataaggcgtttacgccgcattcggcaaccaacgcctgatgcgacgcttgcgcgtcttatcaggcctacaacggctgtcaaatgtaggccggataaggcgtttacgccgcatccggcataaaaacaggttgtcattatctgaaaggggcgaaagcccctctgattatcgggtttagcgcgctattgcctggctaccgctgagctccagattttgaggtgaaaacaatgaaaatgaataaaagtctcatcgtcctctgtttaagtgcagggttactggcaagcgcgcctggaattagccttgccgatgttaactacgtaccgcaaaacaccagcgacgcgccagccattccatctgctgcgctgcaacaactcacctggacaccggtcgatcaatctaaaacccagaccacccaactggcgaccggcggccaacaactgaacgttcccggcatcagtggtccggttgctgcgtacagcgtcccggcaaacattggcgaactgaccctgacgctgaccagcgaagtgaacaaacaaaccagcgtttttgcgccgaacgtgctgattcttgatcagaacatgaccccaagtgccttcttccccagcagttatttcacctaccaggaaccaggcgtgatgagtgcagatcggctggaaggcgttatgcgcctgacaccggcgttggggcagcaaaaactttatgttctggtctttaccacggaaaaagatctccagcagacgacccaactgctcgacccggctaaagcctatgccaagggcgtcggtaacagcatcccggatatccccgatccggttgctcgtcataccaccgatggcttactgaaactgaaagtgaaaacgaactccagctccagcgtgttggtaggacctttatttggttcttccgctccagctccggttacggtaggtaacacggcggcaccagctgtggctgcacccgctccggcaccggtgaagaaaagcgagccgatgctcaacgacacggaaagttattttaataccgcgatcaaaaacgctgtcgcgaaaggtgatgttgataaggcgttaaaactgcttgatgaagctgaacgcctgggaagcacatctgcccgttccacctttatcagcagtgtaaaaggcaaggggtaattacgccccacagtgctgattttgcaacaactggtgcgtctcctggcgcacctttttttatgcttccttcctgggatatgagcgattttttatagtaactcacttcttcttcactaagaatatccattatctcaatgccttatcagagattcttttcctttcgccggtagtgtctggacattcaggctacttttccaggttattttatttctgttatgcagaggttttatgataagtcatatcctaaattctggcggcaataactctttgatgaaacatgatgtggtgcaaggaaataatatagtagatcttgatttactacgtaatttaaatggggtgccaggtttaaacagagataactttatttatatcagcaatattttttcaaatataaaacaacggaacgaaaaaatcatgcaataaatatgtttcgtgaagtctcaatcagtaatgatactataagtgtaaaattctacagaaatgaaaaaaattgaatgcgcttgcaattttctgatggataaagatgcgcaggggtatatcgacctgtctgatttggatttaacaagttgtcattttaaaggtgacgttataagcaaggtgtcttttttaagtagtaatctacaacatgtaacattcgaatgtaaagaaattggggattgcaattttactactgcaatagttgataatgtcatatttagatgtcgacgtttacacaatgtgatttttatcaaagcgagtggtgaatgtgtcgatttcagcaaaaatattcttgatacagttgacttcagccagagtcaacttggtcatagtaattttcgcgaatgtcagattagaaatagtaacttcgataattgttatctttacgctagccacttcaccagagcagagtttctgtctgccaaagaaataagttttattaaaagcaatttgacagctgttatgtttgattatgtgcgaatgagcacagggaattttaaagattgcattacagaacaattggaattaactattgattatagtgatatattttggaatgaagatctcgatggttatatcaataacattataaaaatgattgatacattgccagataatgcaatgatattgaaatccgttctggccgtaaaactggtgatgcaattaaaaatacttaatattgttaataaaaactttattgagaatatgaagaaaatatttagccattgtccttatataaaagatcccattatacgcagttatatccattctgatgaagataacaagttcgatgattttatgcgtcaacatcgattcagtgaggtgaatttcgatacccaacagatgatcgattttattaacagatttaatacgaataaatggctaattgataaaaataacaatttttttatccaacttatcgatcaggccttacgaagtacggatgatatgatcaaagcaaatgtttggcatctttataaagagtggattcgtagtgatgatgttagtcctatatttatagaaactgaagataatttaagaacctttaacacgaatgaattaacacgaaacgataatatctttatcctgttctccagtgtcgatgatgggccagttatggtggtaagctcccagcgcttacatgatatgttgaatcctacaaaagataccaattggaattccacgtatatctacaaatccagacatgagatgttgcctgttaatcttactcaggaaacacttttcagctccaaatctcatggtaaatatgcgcttttccccatttttactgcgagttggcgagctcatcgtataatgaataagggtgtttaagtaaaggaaaacatcaccgttcctggcatcctggacggtgatgcccctacggttgccctcgccagcacgggcatcggtaaagcgtaaggttcaacatcgttttaccacttcatgcgattgttgcgtttttgttgcgtattagatcacttaatttgctttacatctcccgtaaacacttttctgcgatacaatgcctttacgttatgtaacggagagttcggcatgagtcaccccgcgttaacgcaactgcgtgcgctgcgctattgtaaagagatccctgccctggatccgcaactgctcgactggctgttgctggaggattccatgacaaaacgttttgaacagcagggaaaaacggtaagcgtgacgatgatccgcgaagggtttgtcgagcagaatgaaatccccgaagaactgccgctgctgccgaaagagtctcgttactggttacgtgaaattttgttatgtgccgatggtgaaccgtggcttgccggtcgtaccgtcgttcctgtgagtacgttaagcgggccggagctggcgttacaaaaattgggtaaaacgccgttaggacgctatctgttcacaagtagcacattaacccgggactttattgagataggccgtgatgccgggctgtgggggcgacgttcccgcctgcgattaagcggtaaaccgctgttgctaacagaactgtttttaccggcgagtccgttgtactaagaggaaaaaaatatggagtggagtctgacgcagaataagctgctggcgtttcatcgcttaatgcgtacggataagccaattggcgcgttactgctgctctggccaacattatgggcgttgtgggtggcgacaccgggcgttccccagctctggatcctggcggtgtttgtcgcgggtgtctggctgatgcgcgctgccggatgtgtggtgaatgattatgctgaccgcaagtttgatggtcatgttaagcgcacggcgaaccgaccacttcccagcggcgcggtaacagagaaagaggcgcgcgcgctgtttgtcgtgctggtactgattagctttttactggtgctgacgctgaatacgatgaccattctgttgagcattgccgcgctagcgctggcgtgggtgtacccgtttatgaagcggtatacccatctaccgcaagtggtgctgggcgcggcgtttggctggagcattccaatggcttttgccgctgtgagtgagagcgtgccattgagttgctggttaatgttcctcgccaatattctctgggcggtggcttacgacacgcagtatgcgatggttgaccgcgatgatgatgtgaagattggcattaaatccacggcaatcctgttcggccaatacgataaattgattattggtattttgcagattggcgtactggcactgatggcgatcatcggtgagttaaatggcttaggctggggatattactggagtattctggtggctggcgcgctgtttgtttatcaacaaaaactgattgccaaccgcgagcgtgaagcctgctttaaagcatttatgaataataactatgttggtctggtactatttttagggctggcaatgagttactggcatttctgatgatgtaaaaaagccggatgatcatccggctttcttctgggttgcctgatgcgcggcgcttctcaggcctacacaacacatcgcaatttattgaatttgcagattatggaaggccggataaggcgttttcgccgcatccggcaattctctctgattacccttcgccctgcgtcgcactctcaatcgtcaaacgcacgtcacttgtaatcaactccgccagcaactgataaaccttcatcgtttctgccggttcggcatcgccgctatcgctgatatacccttcatcacgcagtgtcagcaccagagaactgaacaccgccttgtcgaagaactccggcgcgttgatgccgtgcagcacggagagacgttgcgcgacggtgcggctctctttctccagcgtaccgcggttgatgctcgggttggcactcaacaaccagaaggtgatggcataacgttgcagcgtttcgcgcgcgcctgcggccagcagctgtagcgtgcgagaatgcgccgggttgatatgcaactcatcatcttgcagggtaatcagcccctgacgttgcatctcatttgccagcgcatcaataacgtccggcaactcgtcgcgatcccagcgcaggaacagctccgctttcagcattgggtaaagcacattgacgtgctccatcaatacgtcgcgggagatgtggcgatgctgggtgacgattgccgccatcaggctaggcagcaccaacatatgcgcaatgttgttgcgatagtaggtcatcagcaccgcttgctcgcgcggcagaatgatgatgtcgccgattgtgtctttctcgacttcaaacttgttcatttgcagcgcgtgatcgataagctcgctggcgctggcactaggaacggtagagtccgtggagtagggcacgttgcgcatcagatccaggtagcagttgagttgctcggttaactgctcgcgggtgagactgcgctgacgacttgccagtagcgcagtacagcacaggttcatggcgtttgccgcgcctgcgttgttaatgcgtaccatcagatcggcagcaatattattgaccgtcggcgttaaccatgccggacgcaccgcttcgatgggatcgatagattcacgccagtcaggtacatgctggttaaggtaggtcatcaacggcattggttcaccgaagttgacgtaaccctgaccgagattacgcagcttgcttaaaccgcgcagcatctgcggcaggctctctttctctttcgtcgcgccgcgcagttctttggcgtaagtacccacttccatgacgtgctcataaccgatatagatcggaatcagcgtaatcggacgcgtgccgccacgcagcatcgcctgaatggtcatgctcagcgtaccagttttcggatccagcaaacgccccgtacgggaacgaccgccttccacgaagtactcgacggaataaccacggctgaacagttcgccgagatactcccggaaaacggtggaataaagtttattgcctttaaacgtacggcgaataaagaacgcccccagacggcggaaaatcggcccggcaggccagaaattcaggttgatcccggcggcgatatgcggcggcaccagcccctggtgatacagcacgtaagaaagcagcaggtagtccatgtgactgcggtggcaaggcacatataccagctcatgaccgtcgtgggccagctggcgaacgcgctcagcgttatggacgttgatgccctggtaaagtcggttccaggtgaagcccagaatacggtcagtcaggcgaatcatctcgtaagagaaattcgccgcaatctcttccatcagtgcaatcgcgttctgctgcgctttttcatgggagatttttttgctgcgcgcttcatcttctaccgctttggcaatggcgcgggaggcgagcagcttattaaacagatcctgacgagcaggcaaacgtgggcctacggcagccagacgttgacgggcaaagtgcatacgcgccacgcgcgccagtttctgagcgatagttttatccgtgccgtgttcatccgccatacggcgcaggctaacactcgggctgaaacgcacaaaactgtcgcgaccgagccacagtacagcgaaaaatttctgtacgccgttaagcatacgcagcggcgggttcacttcgcctttttcacgccccggcgcgcgaccaaacatcacgctcactggcaccatctgcacatccagatttgggttgctacggtgcaaatcgagatagtcgtggaacagcttaatagactcttctttcggcgtgtaataggtgaacacacgcggcccgccgtgaatgaacacatagcgcggcagtagcgtgccgtcgatttccagcggctctaacgggtcaggcaagtcatgtgccagacactgggcgcgcaacgtcagcaaatctgctttgctgttgtacggtaaaacgtacataattggacgagaggtatccagccccagttccggggcaggatctgccggaatagacttgctttttaccaggatgcttaatggtaaattcagtaatttgtagtaaattcgtggccagccggacataaacgatgtaaagcctctggttaataatgcaaatgcgcggcaaggatagcagaaagtcatgggaaattctgtggtatccgctcatgtttcgcgcggcgctacgcaaacccgaatcatcggatttaacggtacactgatattgacgctcataatgtaaaaaggttctttcaatggccaataataccactggattcacccgaattatcaaagctgctggctattcctggaaaggtttacgcgctgcatggatcaacgaagcggcattccgtcaggaaggcgtagcggtattgttggcggtggtcatcgcctgctggctggatgtggacgcgattacccgcgtgctgcttatcagctccgtgatgctggtgatgattgtggaaatcctcaatagcgccatcgaagcagtggttgaccgaattggctctgaataccatgagctttccggacgcgcaaaagatatgggatccgctgcggtgctgattgccattatcgtcgccgtgattacctggtgcattctgttatggagccattttggataacccttccagaattcgataaatctctggtttattgtgcagtttatggttccaaaatcgccttttgctgtatatactcacagcataactgtatatacacccagggggcggaatgaaagcgttaacggccaggcaacaagaggtgtttgatctcatccgtgatcacatcagccagacaggtatgccgccgacgcgtgcggaaatcgcgcagcgtttggggttccgttccccaaacgcggctgaagaacatctgaaggcgctggcacgcaaaggcgttattgaaattgtttccggcgcaagtcgcgggattcgtctgttgcaggaagaggaagaagggttgccgctggtaggtcgtgtggctgccggtgaaccacttctggcgcaacagcatattgaaggtcattatcaggtcgatccttccttattcaagccgaatgctgatttcctgctgcgcgtcagcgggatgagcatgaaagatatcggcattatggatggtgacttgctggcagtgcataaaactcaggatgtacgtaacggtcaggtcgttgtcgcacgtattgatgacgaagttaccgttaagcgcctgaaaaaacagggcaataaagtcgaactgttgccagaaaatagcgagtttaaaccaattgtcgttgaccttcgtcagcagagcttcaccattgaagggctggcggttggggttattcgcaacggcgactggctgtaacatatctctgagaccgcgatgccgcctggcgtcgcggtttgttttagttctctcttcatcaggcttgtctgcatggcattcctcactagttctgataaagcactctggcatctcgccttacccatgattttctccaatatcaccgttccgttgctgggactggtcgatacggcggtaattggtcatcttgatagcccggtttatttgggcggcgtggcggttggtgcaacggcgaccagctttctctttatgctgttgctgtttttacgcatgagcaccaccgggctgactgcgcaggcttatggtgccaaaaatcctcaggcattagcccgtacgctggtgcaaccgttgctgttggcgttgggggctggggcgttaattgcgctgctgcgtacgccgattatcgatctggcgctgcatattgttggcggtagtgaggcagtcctggaacaggcgcggcgctttcttgaaatccgctggttaagcgcaccggcgagcctggcgaatctggtattactcggttggttactcggcgtgcaatatgcccgtgcgccagtaattttgttagtggtcggcaatatcctcaacattgtgctggatgtctggctggtgatggggctgcatatgaacgtgcagggcgcggcgctggcgacggttattgcggaatatgcaacattgctgattggtctgctaatggtgcgtaaaatcctcaaactacgcggaatttccggcgaaatgctgaaaactgcctggcgaggaaacttccgtcgcttgctggcgcttaaccgcgatatcatgctgcgtagcctgttgttgcaactctgtttcggcgcgatcaccgtacttggcgcgcgactggggagtgacattatcgctgttaacgcggttctgatgacgctactcacctttaccgcctatgcgctggatggttttgcctacgcggttgaagcgcactccggtcaggcatacggtgcgcgcgacggtagccagttgctggatgtctggcgggcagcgtgccgccagagcgggatcgtagcgttactgtttagcgtggtttatttgctggctggggaacacatcattgcgttactgacgagcttaacccagattcagcagctggctgaccgctatcttatctggcaggtgattttgccggtggttggcgtctggtgttatctgctggacggcatgtttataggcgcaacgcgtgccaccgaaatgcgtaacagtatggcggtggccgccgcaggttttgcgctgacgctccttacgctgccgtggctgggtaatcatgctttgtggctggcattaaccgtctttctggcgttgcgcgggctttctctggcggctatctggcggcgtcactggcgcaatggtacctggtttgccgcaacgtgacggttaaaaattctgaataaataatcctaagccaaattgctgactacacttaatctcacgttcagaagaaaagtgaacgtactctcattcacaacctaacgatgaggtcttgattatgaataaagatgaagccggcggtaactggaaacagtttaaaggtaaagtgaaagagcaatggggcaaactgaccgatgatgatatgacgatcattgaaggtaaacgtgatcaactggtcggtaaaatccaggaacgttatggttatcagaaagatcaggcagaaaaagaggtcgtggattgggaaacccgcaatgaatatcgctggtaattaatccctcctgcccgacgtgtacaaggatgtacgccctcttaacgcggtttctttttcacctgcacagagtgatcatgctggcactgttcaggatgacgacacgcttccacttctacacatgccgcacagagcccatgtgcttcaatcacattatgccgcagggcaaaccccatttttgccgccagcgtatgcataatgtcttccacgccttctgcacactcttctttcactgcgccgcagcgatcgcaaataaacatggcactcgtatgggtgggctgatcgaacagatgacagagcacataactgttggtggattccaccttatgcacaaaaccttgctcaagcagaaaatccagcgcgcgataaaccgttggcggcttggcttgcggttcagcttcgcgcagtaaatcaagcagatcataagcgctgatagcgccatcctgcagactcatcaggcgcaacacttccaggcgctgtggggtcaggcgcacattacgctgcgcgcagattttttcagcctgcgctaataactcctgcgttgtggtcttttccatcgggcacctcaaagtgggggttaagaatgtccttactttaccatgttccaggaaaaacaccgagaacccttattgttgccgtaatgttgattttctgctttgtaggtaaggtgttatgttgccttgtcgtaccattatcaacacgataataattaataattcatttttaaataaattgcttcaagttaactcgctatttatttaactgggtttaaacgcatacctgtagttcagaaattatgagcgatttttgatagtgaccagatggcaaaagaattataaggaggacacggtacgacaaaaaaggtagatgaatcatgttgaagataatacccggtgcaactggatactttaataaaacactcaatagtaatcaattcgataatgaagatgcaatcaaagataaattagataatagaggtagtatcaaaggtaaattaaataatatatatggtaaatctattgattatgcagcgctgcgtcatcgggatataattattgcaaaaatagatttgtttattcaacgaatcacgcataatttatggcatgcacgtaaaaaaatgtgtttttaattgtgcaaataaatgatctcaaaatgtgggtcaataagtatattgacgattgcactgatgaggatttaaacgatcgtgactttattgcaagtgttgttgaccgggctatttttcatttcgcgattaatagtatatgtaatcctggggataataaagatgcaatgcccattgaacaatgtacttttgatgtagaaactaagaatgaccttccctccacggttcagctattttatgaggaatctaaggataatgaacctttagcgaatatacattttcaagcaataggttctggttttttaacgtttgttaatgcctgccaggaacatgatgacaacagcttaaaattatttgctagcctgttaattagtcttagttattctagtgcctacgcagatttaagtgaaacagtgtatattaatgaaaataatgagagctacctgaaagctcagtttgaaaaattatctcaacgtgatatgaagaagtacctgggagagatgaagcgtctggctgatgggggagaaatgaattttgatggctatctggataagatgagtcatctggtgaatgaaggaacgctcgatcctgatattttaagcaaaatgcgagatgctgcaccacaattaattagcttcgcgaagagctttgacccaaccagtaaggaagagattaaaatacttacagacacttctaaattaatttatgatttgttcggggttaaaagcgagaaataatatgtgaagttcttcgatagtatggaaggcattatataaaaggacccaatatttattgggttcttttttctctatcaatactattagcagggagatatatcaccagagtttaatgtgtgattttttatttatcgtcgaacctggattgtttatcattggccttaacaaagttaacggctaataagattatttccatcacttcgtgagagcttcatgccttgagaggatctcaattttcttttgcaatgagacaggcgcttcctgttgttatggtatagtaccccgctattgagcctcctgaatagtgatgctgaataacataaccccatgatatatcgataaaataatctctacatttgaaaatgcacggtaattctgaaatgcaaaaaatcaaccaaaccagcgcaatgcctgaaaaaactgacgttcactggagtggtcggtttagcgttgcaccaatgctcgactggacggacagacattgccgctatttcttgcgtctgctttcccgcaatacgttgctgtataccgaaatggtgaccacaggggcgattattcacggtaaaggtgattatctggcgtacagtgaagaagaacatccggtagcgttgcaactgggcggtagcgatccggcggcgctggcgcagtgtgcaaagctggcagaagcgcgcggatatgatgagatcaacctgaatgtcggctgcccgtctgaccgggtgcagaacggcatgtttggtgcgtgtctgatgggtaatgcgcagctggttgccgactgcgtgaaagcgatgcgcgatgtggtgagcattccggtgacggtgaaaacgcgtattggcatcgacgaccaggacagctatgaatttctctgcgatttcatcaataccgtttccggcaaaggcgagtgtgagatgttcatcatccacgcacgtaaagcctggcttagcgggttaagcccgaaagaaaaccgtgaaatcccgccgctcgattatccgcgtgtgtatcaactgaagcgtgactttccgcatctgacaatgagcattaacggtggtatcaagagcctggaagaggccaaagcacacctgcaacatatggatggcgtgatggtcgggcgcgaggcgtatcagaatccgggtattctggcggcggtagaccgggagatctttggttccagcgataccgatgccgatccggtggcggtagtgcgcgccatgtatccgtacattgagcgtgaactcagccaggggacgtatctcggccatattacccggcatatgttgggcttgttccagggtattcctggcgcgcggcagtggcggcgttatttaagtgaaaatgcccataaagcgggtgcagacattaatgtgctggaacacgcgctcaaactggtggcggataagcgttaacttttcaccaaaaagtagtcaaattcaccacgccctgcgcaccgtcgcggggcgttttgctgttaaatcaatagattatttttggcatgattcttgtaatgccagcaagagatttcatatttgggagagcatcatgctggaactactttttgtgattggcttttttgtcatgctgatggtcaccggcgttagcttgctgggcattatcgccgcgctggttgtggcgacggccattatgttcctcggcggtatgctggcattgatgattaagttgctgccgtggttactactggcgattgcggtggtgtgggttattaaggcgattaaagcaccaaaagtgccgaaatatcagcgttatgaccgctggcgttactaagggattgtgcggatgatcacaacctaaggttttatccttagaacaaaataggaattgataatcaaatctgtcactattgcgcctctaacagattcatcgtgctgtaccctacatacagccgaactataaaaagaaagggcttcccaggtggaagccctatttcttttatggaatcagcaggctggaaccttgcgtcgcccggctttccagaatctcatgcgcacgctgcgcatccttcagcggatatttctgctgctcggcgacatcgaccttaatcacaccgctggcaatcaaagagaacagttcattactggcctcggttaattcctcccgcgtggtgatatagccttgcagggaagggcgtgtcacatacaagctgcctttttgattgagaatgcctaagttcacaccggtaaccgcaccactactgttgccaaaactgaccattaagccgcggcgttgcaggcaatccaggctccgttcccaggtgtctctgcccacggaatcgtacaccacgcgcactttcttaccgccggtgatctcttttaaccgctcgaccagatcctcttcacgatagttaataacctgccacgcgcccgcttttagcgcgctctgcgctttttgcgcggttcctacggtgccgataagtttcgcgcccagggcttttgcccactggcaggcaattaagccaacgccgccagccgctgcgtggaacaggaactgttcatcgggtttaatttcataggttttgcgcagcagataataaaccgttaagcctttcaggaaggatgccgcagcttgctcaaaagaaattgccgcaggcagaatcgccgctttatccgcaataatgttatgcacagagctgtaagcgcctaacgcgctctgcgcatagactacacgatcgcctgccttaatatgctttacaccactgccgactttactcacgatgcctgctgcttcggtgcctaatccgctgggtaggcttggcggcgggtaaaggccgctgcggatatatgtgtcgataaaattgatgccgatggctttattttcgacctggatttcattctccgccggatcggcaggagtgaactctacggcttgaagtacttccgggccaccgtgcttgtgaaattcaattcgtgttgccatgtgtcctccagaacgtatcgtcagggtctgcttcatatgataaagtttcgacccattctttatctcggtaactccattcactatggcaggaaataaacccttcaacaaacagcaggctgaaccccgcgaacgcgatccacaagttgccgggctgaaagtgcctccgcacagcatcgaagcggagcagagcgtgttgggcggtttaatgctagataacgaacgctgggatgatgtagccgagcgtgtggtagcagacgatttttacacccgcccacaccgtcatatctttactgaaatggcgcgtttgcaggaaagcggtagccctatcgatctgattactcttgcggaaagcctggaacgccaggggcaactcgatagcgtcggtggttttgcttatctggcagagctgagtaaaaatacgccaagtgcggctaacatcagtgcctatgcggacatcgtgcgtgaacgtgccgttgtccgtgagatgatcagcgttgcgaatgagattgccgaagctggttttgatccgcaggggcgtaccagcgaagatctgctggatctggctgaatcccgcgtctttaaaattgccgaaagtcgtgcgaacaaagacgaagggccgaagaacatcgccgatgtgctcgacacaaccgtggcgcgtattgagcagttgtttcagcagccacacgatggcgttaccggggtaaacaccggttatgacgatctcaacaaaaaaaccgctggcttgcagccgagcgatttgatcatcgtcgccgcgcgtccgagcatgggtaaaacaacatttgcgatgaacctcgtcgaaaacgcggcgatgttgcaggataaaccggtacttatcttcagcctggagatgccaagtgaacagatcatgatgcgttctctggcgagcctgagccgcgttgaccagactaaaatccgtaccgggcagctcgatgacgaagactgggcgcgcatttccggcaccatgggtattttgctcgaaaaacgcaatatctatatcgatgactcctccggcctgacgccaacggaagtgcgttcccgcgcacgccgtattgcccgtgaacacggcggcatcgggcttatcatgatcgactacctgcaactgatgcgcgtaccggcgctttccgataaccgtacgctggaaattgcagaaatctctcgcagcctgaaagcactggcgaaagaactgaacgtgccggtggtggcgctgtcccagttgaaccgttctctggaacaacgtgccgacaaacgcccggtcaactccgacctgcgtgaatctggctctatcgagcaggatgcggacttgatcatgtttatctatcgtgatgaggtgtatcacgaaaacagtgatttaaaaggcatcgcggaaattattatcggtaaacaacgtaacggcccaatcgggacggtacgcctgacctttaacggtcaatggagccgcttcgacaactatgcggggccgcagtacgacgacgaataataattattttatgaattaggtaattaaagcaaacacttatcaaggaacacaaatgcaagcggcaactgttgtgattaaccgccgcgctctgcgacacaacctgcaacgtcttcgtgaactggcccctgccagtaaaatggttgcggtggtgaaagcgaacgcttatggtcacggtcttcttgagaccgcgcgaacgctccccgatgctgacgcctttggcgtagcccgtctcgaagaagctctgcgactgcgtgcggggggaatcaccaaacctgtactgttactcgaaggcttttttgatgccagagatctgccgacgatttctgcgcaacattttcataccgccgtgcataacgaagaacagctggctgcgctggaagaggctagcctggacgagccggttaccgtctggatgaaactcgataccggtatgcaccgtctgggcgtaaggccggaacaggctgaggcgttttatcatcgcctgacccagtgcaaaaacgttcgtcagccggtgaatatcgtcagccattttgcgcgcgcggatgaaccaaaatgtggcgcaaccgagaaacaactcgctatctttaataccttttgcgaaggcaaacctggtcaacgttccattgccgcgagcggtggcattctgctgtggccacagagccattttgactgggtgcgcccgggcatcattctttatggcgtcagcccgctggaagatcgctccaccggtgccgattttggctgtcagccagtgatgagtctaacctccagcctgattgccgtgcgtgagcataaagccggagagcctgttggttatggtggaacctgggtaagcgaacgtgatacccgtcttggcgtagtcgcgatgggctatggcgatggttatccgcgcgccgcgccgtccggtacgccagtgctggtgaacggtcgcgaagtaccgattgtcgggcgcgtggcgatggatatgatctgcgtagacttaggtccacaggcgcaggacaaagccggggatccggtcattttatggggcgaaggtttgcccgtagaacgtatcgctgaaatgacgaaagtaagcgcttacgaacttattacgcgcctgactagtagggtcgcgatgaaatacgtggattaatcgttctgtaatatttgattgtctgtgccggatgcggcgtgaatgccttatccggccaataaaatcctaaaaattcaataagttgatgttctttcatgctcttataaaggtcgtgcctctggcggatgtacgtttgtcatgagtctcactctgttgctaattgccgttcgctcctgaacatccactcgatcttcgccttcttccggtttattgtgttttaaccacctgcccgtaaacctggagaaccatcgcgtgtttcaaaaagttgacgcctacgctggcgacccgattcttacgcttatggagcgttttaaagaagaccctcgcagcgacaaagtgaatttaagtatcggtctgtactacaacgaagacggaattattccacaactgcaagccgtggcggaggcggaagcgcgcctgaatgcgcagcctcatggcgctagcctttatttaccgatggaagggcttaactgctatcgccatgccattgcgccgctgctgtttggtgcggaccatccggtactgaaacaacagcgcgtagcaaccattcaaacccttggcggctccggggcattgaaagtgggcgcggatttcctgaaacgctacttcccggaaagtggcgtctgggtcagcgatcctacctgggaaaaccacgtagcaatattcgccggggctggattcgaagtgagtacttacccctggtatgacgaagcgactaacggcgtgcgctttaatgacctgttggcgacgctgaaaacattacctgcccgcagtattgtgttgctgcatccatgttgccacaacccaacgggtgccgatctcactaatgatcagtgggatgcggtgattgaaattctcaaagcccgcgagcttattccattcctcgatattgcctatcaaggatttggtgccggtatggaagaggatgcctacgctattcgcgccattgccagcgctggattacccgctctggtgagcaatagcttcagcaaaattttctccctttacggcgagcgcgtcggcggactttctgttatgtgtgaagatgccgaagccgctggccgcgtactggggcaattgaaagcaacagttcgccgcaactactccagcccgccgaattttggtgcgcaggtggtggctgcagtgctgaatgacgaggcattgaaagccagctggctggcggaagtagaagagatgcgtactcgcattctggcaatgcgtcaggaattggtgaaggtattaagcacagagatgccagaacgcaatttcgattatctgcttaatcagcgcggcatgttcagttataccggtttaagtgccgctcaggttgaccgactacgtgaagaatttggtgtctatctcatcgccagcggtcgcatgtgtgtcgccgggttaaatacggcaaatgtacaacgtgtggcaaaggcgtttgctgcggtgatgtaatgcaggaaagcaggctggagctacccagcctgcagtgaaattaaactgtcgtcgctttcactctttctttatagatgatttttttgatgccatcgttctacgtgagagataataaacgttgttagttcttttattgttaagcttatcccaattatctggaattccttatcctgtttttttgggtggagtaataatttctgcacatctaaccattattaaatttaataataagtatcgggtttgttacgatagaatatttctatatcctcaagaatatgctttgccttattgcctgtgactttctgagattcaattatagtatcgttaaattctaatgttaaagagaactcttttttccgctttgtgtaagtttaaccttatattgattaccaatatcaaataaaaaggtcctgtaatgagaataatcacctttaacctcctcggcaaaacagcaaagcgtgcaaatatacataaagtctttcttacccctgattttgttaactaaatcaataaatgcgtgaaaaactttacttgcaatagaacttgatacttcttctccaggtctaaaaaatcttttgcaatttttaactgtgtttctatgtataaaaagaaatctttggcataagagatatctttattatttagtgcatctagctcaacaggtaaagatgtcgttttgttgctattcacatatgatatattcatatcatcatctccatcgcgagtaataaaattaatcaccattgtagggtagggggctggtcaatcagaaatcatctttataaacttcgattgtttttgtaatgctgtatcattaagttcattaaatcgtacagcagataaatgttctatcaaatttcgctcatttgccgaggattcatcataataaacgtaaaattaatgtatccttacatcgagtaataaacattttttatacaaaaaaagacaggaacgtatttactgggttaaatataatcatcctgcttttcatcacaaaaaccgcagataatccttcctttccccggcagctggcgttatggtcagatggtttttgcaacaaatctcacaataaaaagtttcaacatactgactatttagggaaaaatatgcgcaagatcacacaggcaatcagtgccgtttgcttattgttcgctctaaacagttccgctgttgccctggccagttctcctagtccgcttaaccctgggactaacgttgccaggcttgctgaacaggcacccattcattgggttagcgtcgcacaaattgaaaatagcctcgcagggcgtccgccaatggcggtggggtttgatatcgatgacacggtacttttttccagtccgggcttctggcgcggcaaaaaaaccttcagcccagaaagcgaagattatctgaaaaatcctgtgttctgggaaaaaatgaacaatggctgggatgaattcagcattccaaaagaggtcgctcgccagctgattgatatgcatgtacgccgcggtgacgcgatcttctttgtgactggtcgtagcccgacgaaaacagaaacggttagtaaaacgctggcggataattttcatattcctgccaccaacatgaatccggtgatctttgcgggcgataaaccagggcaaaatacaaaaagccaatggctgcaggataaaaatatccgaattttttatggcgattctgataatgatattaccgccgcacgcgatgtcggcgctcgtggtatccgcattctgcgcgcctccaactctacctacaaacccttgccacaagcgggtgcgtttggtgaagaggtgatcgtcaatagtgaatactgacagagcgggagagcgtgatgctctcccgaatgctgtttttttaatcacacctttatcctttcgctgtcttgctgcaaactgattaagagagttttatcaaggagcagcacatgtggtatcaaaagacgctcacgcttagcgccaaatctcgtgggtttcatctggtaacggatgaaattctgaatcagctggctgatatgccgcgcgttaacatcggcttactgcatctgttgctgcaacatacctccgcctctctgacacttaatgagaactgcgatcccaccgtacgccacgacatggagcgttttttcctccgcaccgttcccgacaacggaaattatgagcatgactatgagggagcagacgatatgccttctcatatcaaatccagtatgctgggaacaagccttgtattgccggtgcataaagggcgtattcagaccggcacctggcaaggcatttggctgggggaacatcgcatccacggcggaagccgtcgcatcatcgcgacactacaaggggagtaaaaaatgaccattagcgagttgctacaatattgcatggcaaaaccaggcgcagaacagagcgtgcataatgactggaaagcgacgcagatcaaagtggaagatgtactgtttgcgatggtgaaagaagtagaaaatcgcccagctgttagcctgaaaaccagcccggagctggcggagctgctacgtcagcagcacagcgatgtgcgtccaagccgccatctgaataaagcgcactggagcaccgtgtatctcgacggtagcctgccagatagccaaatctattatctggtggatgcgtcttatcagcaggcggtgaatttactgccggaagaaaaacgtaaattgctggtgcaactctgaaaggaaaaggccgctcagaaagcggccttaacgattacagcatcggcttaaggaagcgtgccgtgtgacttgcttcgcactccgcgacggtttctggcgtaccggagacgaggatctcgccgccaccactgccgccttctggtcccaggtcgacaatccagtcagcggttttgatcacgtcgagattgtgctcaatcaccacaatggtgttgccctgatcgcgcagtttatgcagtacgtcgagcagttgctgaatatcggcgaagtgcagaccggtggtcggctcgtcgagaatatacagcgtctgcccggtgccgcgtttactcagttcacgcgccagcttcacgcgctgggcttcaccgccactaagggtggttgcggactgccccagtcgaatgtacgtcaggccaacgtccatcaacgtttgcagcttacgcgccagtgcaggtacggcatcaaagaactcacgcgcctcttcgatggtcatatccagcacttcgtggatggttttgcctttgtacttaatctccagcgtttcacggttatagcgtttacctttgcactggtcgcacggcacgtagatatccggcaggaagtgcatctccactttgatcacgccatcgccctgacaggcctcgcagcgtccgccacgaacgttaaagctgaaacgtcccggcgtatagccgcgcgcacgggattccggtacgcccgcaaacagttcgcgcacaggcgtaaacacgccggtataggtcgccgggttagaacgtggagtacgaccaattgggctttggtcgatatcgatcactttatcgaaatgctccagcccctgaatatcgcgatacggtgctggttcggcgatggtcgccccattcaactggcgttgggcaatcgggaacagtgtgtcgttaatcagcgtgcttttaccggaaccactaaccccggtgatgcaggtaaacagacccaccggcagcgtcagcgtcacgtccttcaggttgttgccgcgtgcgcctgtcagcttcagcactttttccggattcgccggaacgcgtttcttcggcacttcaatcttgcgtttgccgctcatgtactgcccggtcaagctctccggcaccgccataatcgcttccagcggaccttctgcgaccacttcaccgccgtgaacacctgcgcccgggccaatgtcgatcacatggtcagcggcgcgaattgcgtcttcgtcgtgctccaccacaatcacggtattaccgagatcgcgcagatggataagcgtacccaacaggcgctcgttatcacgctggtgcaggccgatagacggctcgtccagcacgtacataacgccaaccaggcccgcaccaatctggctcgccagacggatacgctgtgcttcaccgccagaaagcgtttctgcgctgcgggaaagcgtcaggtaattcaggccgacgttaacgaggaatttcagacgatcgccgatctctttaaggattttttctgcaatcttcgcccgctgacctgcgagtttgagattgttgaagaattccatcgcatgaccaatgctcatgtcggagatagcaggcagcggcgtattctcgacatacacgtggcgcgcttcccgacgcagacgcgtcccttcgcagctggcgcacggacgattactgataaacttggctaattcttcgcgtaccgcgctggattccgtctctttatagcggcgctccatattatgcagcacgccttcgaacggatgacgacgaatggaggtatcgccacgatcgttcatgtatttgaattcaatgttttctttgccagaaccgtacaacaccactttatgcacgttcgcgctcaggctgccccacggcgcttcgacgtcgaacttatagtgatctgccaggcttttcagcatctggaaataatagaagttgcggcgatcccagccacggatcgcaccaccagccaggctcagttccggattctggatcactcgatcaggatcgaaatattgctgtacgccaaggccgtcgcaggtcgggcaggcccccgccgggttgttaaagctaaacagtcgcggctccagttcacgcatactgtagccgcaaattgggcaggcgaagttggcggagaacagcagctcttccgctttcgggtcgtccatatccgccactaccgcggtaccaccggaaagctccagcgcggtttcaaaactctcggcaagacgttgggtaagatcgtcacgcaccttgaagcgatcaaccaccacttcaatggtatgtttcttttgcagttccagttttggcggatcggaaagatcgcagacttcgccatcaatacgagcacggatgtagccctggcttgccaggttctccagcgttttggtgtgttcgcctttgcgctctttaatgattggcgcgagtagcatcagacgcttgccttccggctggctcagcacgttatccaccatctggctgacggtttgcgccgccagcgggacgtcgtggtccggacagcgcggctcgccaacgcgggcgaataacaaacgcaaatagtcgtggatttcggtgattgtccccaccgtagaacgcgggttatgagacgtgcttttctgctcaatactgatggcaggagaaagcccctcaatatgatcgacgtccggcttttccatcagactcagaaactgccgcgcgtaggcggaaagggattcaacgtaacggcgctgcccttcggcatataaggtgtcgaaagcgaggctggatttgccagaaccgctaagcccggtcacgacaatgagcttgtcgcgggggataacgaggttgatgtttttgagattatgggtgcgggcgccccgaacttcgatcttatccattcacctttcccggattaaacgcttttttgcccggtggcatggtgctaccggcgatcacaaacggttaattatgacacaaattgacctgaatgaatatacagtattggaatgcattacccggagtgttgtgtaacaatgtctggccaggtttgtttcccggaaccgaggtcacaacatagtaaaagcgctattggtaatggtacaatcgcgcgtttacacttattcagaacgatttttttcaggagacacgaacatggccagcagaggcgtaaacaaggttattctcgttggtaatctgggtcaggacccggaagtacgctacatgccaaatggtggcgcagttgccaacattacgctggctacttccgaatcctggcgtgataaagcgaccggcgagatgaaagaacagactgaatggcaccgcgttgtgctgttcggcaaactggcagaagtggcgagcgaatatctgcgtaaaggttctcaggtttatatcgaaggtcagctgcgtacccgtaaatggaccgatcaatccggtcaggatcgctacaccacagaagtcgtggtgaacgttggcggcaccatgcagatgctgggtggtcgtcagggtggtggcgctccggcaggtggcaatatcggtggtggtcagccgcagggcggttggggtcagcctcagcagccgcagggtggcaatcagttcagcggcggcgcgcagtctcgcccgcagcagtccgctccggcagcgccgtctaacgagccgccgatggactttgatgatgacattccgttctgatttgtcattaaaacaataggttatattgttttaaggtggatgattaaagcatctgccagccataaaaaagaagcctccgttatggaggcttctacgtatcaggtcaaaatcattggccattgtggcggtgtctgattcatctcttctatcatcacgctctcgatgttgtgccagatagcggtgatgtccgccattgtgatgccaagcaaccccattgcgaaccaacaggcggaaacaacgcccagaccgctgctgatcaccgcaagcccgacataatcagaccgacgaaaacggatgttgagtgtgctggccagaaacatcattacggcactaagaagttgccagcgaagaagaaccacgccagtggtgagggtagccatcaaacaattcctctgaaaagagccgatgccctggacagcgcggcgttgttcacgggaggcgtggtacactctggctatcgcggggcttgcagaacacaaaaatgaaacactctgtttgtttcattaattttgtgaactatatcacaattgattgtttgttagccatattaggccgtgacttttattgctgtacagattatgtggtttttcagtggcattaagggcatatcttcccgccgcctctgcattcctgtaggaaattaattttgaatatcaatgaattattttcatccaggtgacgattagaaaggtatcaatttcaaatcaggcaaaagtgctatttataccgtaagatttatctaaagacgtcggtacccagggttttcaccttgcaatggccgggtataaacaggcaggaaattgatagcaatgagtcatcgtgcacgacaccaattactggcgttgccgggcattatctttttagttctctttcccatcattcttagcctatggattgccttcctttgggcaaaaagtgaagtgaataatcagctccgaacctttgctcaactggcactggataaatccgagctggtcattcgccaggcagatttagtgagcgatgcagctgaacgctatcaggggcaagtttgcactccagcccatcaaaagcgaatgttgaatattattcgtggctatctttatattaatgaattgatctatgcccgtgataaccattttttatgcagtagcctgatagcgcctgtaaacggctatacgattgcaccggccgattataagcgtgaacctaacgtttctatctattattaccgcgatacgccttttttctctggctataaaatgacctatatgcagcggggaaattatgtggcggttatcaaccctctcttctggagtgaagtgatgtctgatgacccgacattgcaatggggtgtgtatgatacggtgacgaaaacctttttcagcttaagcaaagaggccagcgcagcaacgttttctccgctgattcatttgaaggatttaaccgtacaaagaaatggctatttatatgcgacagtttatagcacaaaacgcccaattgcagccattgttgcgactagttatcaacgtcttataacccatttttataatcatcttatttttgcgttgcccgccggtattttggggagtcttgttctgctattactctggctacgtattcgacaaaactatttatctcccaaacgtaaattgcaacgcgccctcgaaaaacatcaactttgtctttattaccagccaataatcgatatcaaaacagaaaaatgtatcggcgctgaagcgttgttacgttggcctggtgagcaggggcaaataatgaatccggcagagtttattccgctggcagaaaaggaggggatgatagaacagataactgattatgttattgataatgtcttccgcgatctgggcgattacctggcaacacatgcagatcgctatgtttctattaacctgagcgcctccgattttcatacgagtcggttgatagcgcgaatcaatcagaaaacagagcaatacgcggtgcgtccgcagcaaattaaatttgaagtgactgagcatgcatttcttgatgttgacaaaatgacgccgattattctggctttccgccaggcaggttacgaagtggcaattgatgattttggtattggctactctaacttgcataaccttaaaagtttgaatgtcgatattttgaaaatcgacaaaagctttgttgaaacgctgaccacccacaaaaccagtcatttgattgcggaacacatcatcgagctggcgcacagcctggggttaaaaacgatcgctgaaggcgtcgaaactgaggagcaggttaactggctgcgcaaacgcggcgtgcgctattgccagggatggttctttgcgaaggcgatgccgccgcaggtgtttatgcaatggatggagcaattacccgcgcgggagttaacgcgcgggcaataaaattacaggcggtggcgataatcgctgggagtgcgatcaaactgccgacggaaaacgcgggagaaggtctgctggctgacataacccaggtccattgcgatatcaaaaatcggacgctcggtggtgcgcaactcaacggcggccagtaacaggcggcgttggcgaatgtaatcgccaagcgtctgatgcgtcaccgtgcggaacattcgttgcaagtaccacttactatagccacttttttttgcgactacatcaatgttaagcggctggtcaatatgctcgtcaatccatgcgataagatcctgaataattttctgatgggacataaatctgcctcttttcagtgttcagttcgttaattcatctgttggggagtataattcctcaagttaacttgaggtaaagcgatttatggaaaagaaattaccccgcattaaagcgctgctaacccccggcgaagtggcgaaacgcagcggtgtggcggtaagcgcgctgcatttctatgaaagtaaagggttgattaccagtatccgtaacagcggcaatcagcggcgatataaacgtgatgtgttgcgatatgttgcaattatcaaaattgctcagcgtattggcattccgctggcgaccattggtgaagcgtttggcgtgttgcccgaagggcatacgttaagtgcgaaagagtggaaacagcttagctcccaatggcgagaagagttggatcggcgcattcataccttagtggcgctgcgtgacgaactggacggatgtattggttgtggctgccttagccgcagtgattgcccgttgcgtaacccgggcgaccgcttaggagaagaaggtaccggcgcacgcttgctggaagatgaacaaaactaaagcgccacaagggcgctttagtttgttttccggtctttgtctttctctctatcccgctggtacacaggagggtttcccccgacgtcaacacacctcattcgagcacgtggtggaggttccggttggtgttgatgctttaattgtatgtcaccgacgtttcttcgccagtgtaaaagtatactttttaaccgcaatatttttgtcatctcagacgattttttatcgcaatcctgaacggtatacggctcgataacgctgcaatcttgcgcaccgacgataacgtttgcgcatcaattgcctggtttttcatcgtcaagacaataaaagagaaaaaagcagcaaacttcggttgaaaaagccgctatgatcgccggataatcgtttgctttttttaccacccgttttgtatgcgcggagctaaacgtttgcttttttgcgacgcagcaaattgtcgcaaacctggagcaggaagataacgtttcgctggcaggggattgtccgccacgcatcttgacgaaaattaaactctcaggggatgttttcttatgtctacgccaagtgcgcgtaccggcggtagtctcgacgcctggtttaaaattagtcaacgtggaagcactgtccgtcaggaagtggttgccgggttaacaacgtttctggcgatggtctacagcgtcatcgtcgttccaggtatgttgggtaaagcaggcttcccgcctgcggcagttttcgttgcaacctgtctggttgccggactcggttctatcgtgatgggtctgtgggctaatctgccgttggcgattggttgcgccatctccctgacagcgtttaccgcattcagcctggtgctggggcaacatattagcgtacctgtcgcgctgggtgccgtgttcctgatgggtgtgctgtttacggtaatttctgccacgggtatccgtagctggattttgcgcaacttgcctcacggtgtggcgcacggcacggggattggtatcggtctgttcctgctgctcattgccgctaacggtgtcggtctggtgattaaaaacccgcttgatggtctgcccgttgcgctgggtgatttcgcgaccttcccggtgattatgagtctggtaggtctggcggtgatcatcggcctggaaaaactgaaagtccctggtggcattctgctgaccattatcggtatcagtattgtcggtttgatcttcgatcctaacgtccatttctccggcgttttcgccatgcctagtttgagcgatgaaaacggcaatagtctgattggcagcctggacattatgggcgcgctgaatcctgtagtcctgccaagcgttctggcgctggtgatgacggcagtatttgatgccaccggaactatccgtgccgtcgccggccaggcgaacctgctggataaagatgggcagatcatcgacggtgggaaagcactgaccactgactccatgagcagcgttttctctggcctggtgggtgcggctccggcagcggtatacatcgagtctgcggcgggtacggcggcgggcggtaaaaccggtttgacggctatcaccgttggcgtgctgttcctcctgattctgttcctctctccgctctcttacctcgttccggggtatgcaacggctccggcgctgatgtacgttggcctgctgatgctgagcaacgtggcgaaaatcgactttgctgattttgttgatgcgatggcgggtctggttacggctgtattcatcgtgctgacctgtaacatcgtaacaggcatcatgatcggcttcgcgactctggtgattggtcgtctggtttccggcgaatggcgcaagttgaacatcggtacggtcgttatcgccgtggcgctggtgaccttctatgcgggtggctgggctatctaatctttcatcggattctgaaaacgggtggcaatggctgcccgtttttattttctccgcacattgtgtgagcttttgcgatattctgaaaaaaatgagaattcaggcataacgtctttctcagatcataaaaaacatcgcaaacagggaacgcatggaaatcttcttcaccatactgataatgaccctcgtggtcagcctgtccggggtggtcactcgtgtcatgccctttcagatcccgcttccgcttatgcaaatcgccatcggtgcgctactggcgtggccgacgtttggtttgcatgtggagtttgatcctgaactctttttagtcttgtttatcccgccgttgctgttcgctgatggctggaaaacgccgacccgtgaatttctcgaacatggtcgagagattttcggcctcgcgctggcgctggtggtggtcaccgtggtcggcattggcttccttatttactgggtggtgccgggcattccgctgatccctgcctttgcgctggcggcggtgctttctccgaccgatgctgtggcgctctccgggattgttggcgaagggcgcatcccgaaaaaaatcatgggcattttgcagggcgaagcgttgatgaatgacgcctccggtctggtgagcttgaagtttgccgtagcagtggcgatggggacgatgatcttcaccgtcggcggtgcgacggtcgaatttatgaaagtagccattggcggtattctcgccggttttgtggtgagctggctgtacggtcgcagcctgcgattcctcagccgctggggcggtgatgaacccgcgacgcagatcgtcctgctgttcctgctgccattcgcttcttatctgattgccgaacatattggcgtttccggcatcctcgctgcggttgccgccgggatgaccatcacccgctccggtgtgatgcgccgtgcgccgctggcaatgcgcctgcgtgcaaacagcacctgggcgatgctggaatttgtctttaacggcatggtgttcctgctgttaggtctgcagctgccgggtattctggagacgagcctgatggcagcagaaatcgaccctaacgtcgaaatctggatgctgtttaccaatattattctgatatatgcggcgctgatgctggtccgtttcggctggctgtggacgatgaaaaagttcagcaaccgcttcctgaagaagaagccgatggagtttggtagctggaccacacgagaaatcctgatcgcgtctttcgccggggtgcgtggggcgatcactctggccggtgtgctctctatcccgctgctcttgccggatggtaacgtcttcccggcgcgctatgagctggtgttcctggcggctggcgtcattctcttcagcctgtttgtcggcgtggtgatgttgcctattctgctacaacacattgaagtcgcggatcatagccaacaattgaaagaggaacgtattgcgcgagcggcaacggcagaagtggcgattgtggcgatccagaaaatggaggagcgtctggcggcggataccgaagagaatatcgataaccagctgcttacggaggtcagttctcgcgtcattggtaacctgcgtcgtcgcgccgatggacgtaacgacgttgaaagttccgtgcaggaagagaaccttgagcgtcgcttccgtctggcggcattgcgttctgaacgtgctgaactttaccacctgcgcgccacacgggagatcagcaacgaaacgctgcaaaaattactgcacgatctcgatttgcttgaagcgttgctaattgaggaaaatcagtaagccgaaagcgacgtaaccaggcccgaggtaatctgaaaaaggtgcaatcttttgcacctttaacaggttagctcgggctaacattcatgattctaaaacaaataaattatctctcttttaaagtcaattcattggctgttcttcgacttaacctcaatctgcatcttgcataatatctgcagtaatcttcatagcgactgcatgaagattatcctcagtttgactcatgccagtatgagtggcacaatcttcttcaaagaatttctgtagtgttaccaggatatcactattaatggagatattttcctcaccacggagaatggtaatacccattccctggacgctagcctcatcgaaattaacacgatagagacggatattaaacatccaggcttttgttaaaacagaacagttgaaatggcaattgcttaaattggcattattaaaattaacattagccatattagagtcggtacatataaccatttcgaggaacgtatttgttaaccgcgtaaaaaagagtttgctatcaattaagtttatattctggagggttgctttattcaggttgacacgagacagatcagcatgttcaaagttaattaaatcaagtttagagaagctaaggtcggctctaaataaattaatatatggcgctattactttataaagatttacctcagccatgtatgccatataaaaattactataatcaaggaaggtatttttaatattggctctattcattgttgcattgtagaattgaacatgcatagcggaacaactatttagagttccgtcagtcatttttatctgagcgaaattactgtcatcgagaatacaattatcaaaaagtattttttccattatggcgaaattaaaattcgttttatacatattacagtcctgaaaaatagcgttttgtagtctgcaacctgcaaaattgctattggataaatcttcatctttaatcacgatacctttcaggctaaggtgactaaaatcgtaaccaccatttactgtctgtgggatttcgatagtattattatggacggtgacattatttataaaatataccaccttaatactcacttccttatctttattaaggtaaactcttctcgtaattctatcgtcacatttattatttgcatgactagctatatctataaaatatttatgtattttcctgtccgtttctttcgtgatttttccacttggtaaactatcataaattcttttcattttctgaatcaagcctatcactttttcatgatcatccattttgaaaagagagagggctttattgtcaattaacgtgtttttatgatgtttgctgtaattatcactttttgttttctttgtatgacttggacttgtgacagagtggttatcgttaatcaggcaaagagggaaaaacatattatttaaaccattatagcgcataaaatatccttataattaacaagaaagaaaaggcatattctctgcattatcattttctacgactgtcaaaaatcgctcattttttaatgagtttatttgtttaatattatgggaaaaggtgatgcatttgggagaggaagagtattccccggtcagacgaccggggaaggggagagattaatgcgcgcggccttgctcaacgccaaagccggtctgggagcggataaactgcgcgcggaacagttcacgctcacgcgcgccttccgcactgttatcggttgcgctgaagaaccagatgccgaggaatgccacggtgatagagaacagcgccgggtattcatacgggaagatggctttttcgtgaccaaggatctgtacccaaatcgtcgggccgaggatcatcagtactactgcggtaatcagccccagccagccacccatcatcgcgccacgcgtggtcagtttgctccagtacatagaaagcagaatgatcgggaagttacagctcgccgcgatggcaaacgccagccccaccataaaggcgatgttctgattctcaaacagcacgccgaggataatcgcaatcacgccgaggatcagtacggtgattttacttacccgcagctcttcacgttcggtcgcgccttttttgaagacgttagcgtacaagtcatggctaaccgcggatgcgcccgccagcgtcagacccgcaaccaccgcgaggatagtggcgaaagcaaccgcactaataaaaccgaggaacaggttgccgcccactgcattcgccaggtgaacggccgccatgttgttaccaccaatcagatggcccgccgcgtctttatattccggattcgcaccaaccagcatgatcgcgccgaagccgataataaaggtcagaatatagaagtagcccataaacccggtggcgtagaacacgctcttacgtgcttcgcgggcatcgctgactgtaaagaagcgcatcagaatgtgcggcaagcccgccgtaccaaacatcagtcccagacccagagagagcgcggagatcggatctttcaccagcccgcccggcttcatgatgtcgacacctttcgggtgtaccgccatcgcttcactgaacagattgttgaagctaaagccgacgtgtttcatcaccataaaggccataaagctggcaccgaacagcaacagcacggctttgataatttgcacccaggtggtcgccagcatgccgccgaacaggacgtacatcatcatcagcacgccgaccagcaccaccgcaatgtgatagttaaggccaaacagcagctcgatcagtttacctgcgcccaccatctgggcgataaggtaaagcgccaccaccaccagagaaccacaggcgctaagaatacgaatcggcccttgtttcagacggtaagaggccacatcggcaaaggtgtagcgccccaggttacgcagacgttcggcaatcaggaacaaaatgatcggccagcccaccaggaagcccaggctgtaaattaagccgtcatagccggaggtaaacaccagcgcggagatccccaagaaactggcggcggacatatagtccccggcaatcgccagcccgttctggaagccagtgatattgccgcctgcggtgtagtagtcgctacgagaacgtacgcgtttacttgcccagtaggtaatgccgagcgtaaacacgacgaaaatcaggaacataataatcgcctgccagttcgttggctggcgctctacggccccgctaatagcatccgcggcgttagctgcgaaagggagtgtggcggcaagcgccgtcagaactcttttcatgatgcttgtacctcatgcagttatttcaacttgcttgtacctcatgcaggacttcattattaagacggtcgaattcgccgttcgcccgccagatgtagataccggtgagaacaaaggagatcacaatcactccaacaccaattggaataccgcgtgtgacgctggtgttcggattcagcggcgtgcccagccagccgggcgcgaaggcgatcagtaaaataaagccgatataaactgccagcataataatgctcaggatggtggcaaaccgttgccgtttttcgactaactccctgaaatgcgcattgtcttctatccgctgataaatagtgccattcatcacagattctccagaggtaatgtagggattgttttaattcccgctcccttatgggagaaggttaacgctcgggtaacccttgccgaatgtaggccggataaggcgtttacgccgcatccggcaatcaatgcctgatgcgacgctgtcgcgtcttatcaggcctacaaaccgttaccgactcgcatcgggcaattgtgggttagcttggcatcgcgatagcctgcttctcttcaagcagcttctcgactacgccaggatcggcaagcgtgctggtatcgcccaggttgctggtatcgcccgccgcaattttgcgcagaatacggcgcataattttgccggagcgggttttaggcagggagtcggtccagtgcagcacgtctggcgtcgccagcgggccaatctctttacgcacccagttgcggacttctgcgtacagttctggactcggttcctccccgtgattaagcgtgacgtaggcgtagatcgcctgacctttaatattgtgcggaatacctactacggcggcttcggcaatcttcggatgcgccaccagcgcgctctcaatctctgccgtccccagacggtgaccggagacgttcagcacgtcgtccacacgcccggttatccagtaatagccatcttcatcgcgacgcgcgccgtcgccgctgaaatacatatttttgaaggtggagaagtaggtctgttcaaaacgttcgtgatcgccaaacagcgtacgcgcctgacccggccaggagtcggtgattaccaggctaccttcggtggccccctccagcgggttaccttcgttatcgaccagcgccggttgcacgccgaagaacggacgtgttgcgctaccggctttcagctcggtagcgccaggcagcggggtgatcatgaaaccgccggtttcggtctgccaccaggtatcgaccaccggacatttctcgttgccgatttttttccagtaccactcccacgcttccgggttaattggctcgcccacggaaccgagaatgcgcaggctgctacggtcggtgccttcgatcgctttatcgccttccgccatcagcgcgcggatcgccgtgggtgcggtatagagaatattgacctgatgcttgtccaccacctgcgccatacgggcaggcgtcggccagttgggtacgccttcaaacatcagcgtggtcgcaccgcaggccagcgggccgtacagcaagtaactgtgtccggtcacccagcccacatcggcggtgcaccagtagatatcacccggatgataatcaaagacatatttaaaggtcagcgccgcgtacaccagataaccgccggtagtatgcagcacaccttttggcttaccggtagaaccggaggtgtagagaataaacagcggatcttcggcgttcatctcttccgcctggtgctgatcgctcgcttgctcaaccaggtcgtgccaccacaggtcgcgcccttcctgccagtcaattttcccgccagtacgcttcagtaccaccacatgctctacgctggtgacgttcgggtttttcagcgcgtcatcaacgtttttcttcagcggaatactgcgcccggcacgcacaccttcgtcggaagtgatcaccagtcgactgttggaatcaataatgcgcccggcaacggcttccgggctgaagccgccgaaaatcacgctatgcaccgcgccaatgcgggcgcaggccagcatcgcaaccgcggcttccggcaccatcggcatataaatcgccaccacatcaccttttttaatgcccagctcgagcagggtattggcgaagcggcagacgtcgcggtgcagctctttatagctgatatgtttgctctggctggcgtcgtcgccttcccagatgatggcggtacgatcgccgttttcttgcagatggcggtcaaggcagtttgccgccagattcagcgtgccgtcctcgtaccatttaatggacacattaccgggggcaaaggaggtgtttttcaccttctggtaaggtttgatccagtcaagaatttttccctgttcgccccagaaggtatcaggtacgttaatagattgttgatacatcgcctcgtactgctgagggtttatcaggcaacggtctgcgatgttggcaggaatggtgtgtttgtgaatttggctcatgcttttgttctccttgtaggatgttaataatatgtggcataagcgttaaatgtaggggtattggcagttttgtttagtatttgggcgacagatcacgcaaaagtagaattgtgcaaataaacggcagggtaatttttgaaggtcagcaacaaaagttgattaattctttgaggaacatgcagttatgcatgctgttgaaaaagaggaagatactgactaactctaaagtggtattttacatgcacttacaattgattaaagacaacattcacagtgtggttatttgttacacataggggcgagcaatgtcatgacagtgtaggtgcggttactgtcgtgaaaaacaataaaaaccgccattgcaacaatggcgcaattcggatgaagcccctatgacaaggataaaaataaacgcacgccgtatcttcagcttattgattccttttttctttttcacttctgttcacgctgaacaaacggctgctcccgcaaaacctgtaactgtggaagcgaagaatgaaacctttgccccgcagcatcccgatcaatatctctcctggaaagccaccagcgaacagagtgagcgtgttgacgccctggcggaagatccacggctggtgatcctgtgggcggggtatcccttcagccgcgattacaacaagccgcgtggacatgcttttgctgtgaccgatgtgcgtgaaaccctgcgtaccggtgcgccgaaaaacgctgaagatggtccgctaccgatggcatgctggagttgtaaaagcccggatgtggcgcgtctgatccagaaagacggcgaagatggctacttccacggtaaatgggcgcgcggcggtccggaaatcgtcaacaacttaggttgtgccgattgccataacaccgcctctccagagttcgccaaaggcaaaccggagttaaccctttcccgtccgtatgcggctcgcgcgatggaagccattggtaaaccttttgagaaagccggacgtttcgaccagcaaagcatggtttgcggtcagtgccatgtggagtattacttcgacggcaaaaacaaagcggttaaattcccgtgggatgacggcatgaaagtcgaaaatatggagcagtattacgacaaaattgccttctctgactggactaactccctgagcaaaacgccaatgctgaaagcgcagcacccggaatatgaaacctggacagcgggcattcacggtaaaaacaacgtgacctgtatcgactgccatatgccaaaagtgcagaacgccgaaggcaaactctacaccgaccataaaattggtaatccgtttgataacttcgcccagacttgtgcgaactgccatacccaggacaaagctgccttgcaaaaagtggtcgcggaacgtaagcagagcattaacgacctgaaaatcaaggttgaagatcaactggttcacgctcacttcgaagcgaaagcagcgctggatgcaggcgcgacggaagctgaaatgaagccaattcaggacgatatccgtcatgcccagtggcgctgggatctggcgatcgcttcccacggcattcatatgcacgcaccggaagaaggtttacggatgctcggtacggcgatggataaagcggcggatgcacgcaccaaactggcgcgcctgctggcgaccaaaggcatcacccatgaaatccagatcccggatatcagtaccaaagagaaagcccagcaggccattggcctgaacatggaacaaatcaaggccgagaagcaggacttcatcaaaacggtgatcccgcagtgggaagaacaggcacgtaaaaacggtctgttaagccaataaccccgttccgcctcgcaaggggcggaaaacacaatggagtgaatatgagcgtattacgtagcttattaactgccggggtgctggcgagcggcctgttgtggagcctgaacggaattaccgctacccctgcggcgcaggcatctgatgatcgctacgaagttacccagcagcgtaacccggatgccgcctgtctggactgtcataaaccagataccgaaggtatgcatggaaaacatgcttccgttatcaacccgaataacaaactgccggtcacctgcaccaactgtcacggccagccaagtccgcaacaccgcgaaggggtgaaagatgtgatgcgctttaacgagccgatgtacaaggttggagagcagaacagcgtctgtatgtcctgtcatctgccggaacagttgcaaaaagcgttctggccgcacgatgtccacgtaaccaaagtggcgtgcgccagctgccattccctgcatccacagcaagatacgatgcagacgttaagtgacaaaggacggattaagatttgcgtcgattgccacagcgatcagcgcaccaatccgaactttaacccggcgtctgttccgttgcttaaggagcagccatgacctggtctcgtcgccagtttctcaccggcgtcggcgtgctggcagccgtcagcggcaccgcagggcgcgtggtggcgaaaacgttgaatatcaatggggtgcgttacggcatggtgcatgacgagagcttatgcatcggctgtaccgcctgtatggatgcttgtcgggaagtgaacaaggtgccggaaggcgtcagccgcctgacgattattcgtagcgagccgcagggcgaatttcctgatgtgaaatatcgcttcttccgtaagtcttgccagcactgcgatcatgcgccgtgcgttgacgtctgcccgaccggtgcgtcttttcgcgatgctgccagtgggattgtcgatgttaatccggatctctgcgtcggttgtcagtactgcatcgccgcctgtccgtaccgcgtgcgctttatccatccggtcacgaagacggcggacaaatgcgatttctgccgtaagaccaatttgcaggccggtaagttgcccgcgtgcgttgaagcttgcccgaccaaggcgctgacgtttggcaatctggacgatcccaacagtgagattagccaactgctgcgccagaagcccacttaccgctacaagctggcgctgggaaccaaaccgaagctgtaccgcgtaccgtttaaatacggggaggtgagccaatgacgcagacttccgcatttcattttgaaagcctggtgtgggactggccgattgccatctacctgtttttgattggtatttctgctggtctggtgacgctggccgtgctgttacgtcgcttctacccgcaggcgggcggtgcagacagtacgttgctgcgcaccacgctgattgtcgggccgggcgcggtgatcctcggtctgttgatcctcgtcttccacctgacaagaccgtggaccttctggaagctgatgttccactacagttttaccagcgtgatgagcatgggggtgatgctgtttcagctctacatggtggtgctggtgctgtggctggcgaaaatctttgaacatgatttgcttgccctgcaacaacgctggttgccgaagctggggatcgtgcaaaaggttctgagcctgctgacgcccgttcatcgcggactggaaacattgatgctggtgctggcggtgttgttgggggcttataccggctttctgctgagcgcgctgaaaagctatccgttcctcaataacccgatcctgccggtgctgttcctcttctccggcatcagctccggtgcggcggtggcgctgatcgccatggcgatacgccaacgcagtaacccgcattccacggaagcgcagtttgtacaccgtatggaaatccctgtggtatggggtgaaatcttcctgctggtggcgttttttgtcggtctggcgctgggcgatgacggtaaagttcgtgcgctggtggcggcattaggtggcggtttctggacgtggtggttctggcttggtgtcgccgggctggggctgattgtgccaatgctgctcaaaccgtgggtcaatcgcagttccggcattcctgccgtgctggcggcgtgtggggccagtctggtcggcgtgttgatgctgcgctttttcattctctacgccggacagttgacggtggcgtaagccagaaaagaggtggtttctggacgtattccttcctgaagtcggttttctggcgttgttgttaagtctcggggtcaacgtgttgaccccgttgacggccttcgcgggagtgcggttgcgctggcctgccatgatgcgactcacttgcatcggcattctggcgcagttcgcgctcctgctgctcgcctttggcgtactgacgtattgttttctcatcagcgatttcagcgtcatttatgtcgcgcaacatagctatagcctgctgagctgggaactcaagctggcagcggtgtggggcggccatgaaggtagcctgctgctttgggtgctgctgctttccgcctggagcgcgctgtttgcctggcattatcggcagcaaaccgatccgctatttccgctgacgttagccgttttatctctcatgctcgccgcactgctactgtttgtggtgctgtggtccgatcccttcgtgcggatatttccaccagcaatcgaaggccgcgatctcaatccgatgctgcaacatcccggtcttatctttcatccaccgctgctttaccttggctatggcggtttgatggtagcggcgagcgtggcgctggcgagtctactgcgcggcgagtttgatggtgcctgcgcccgaatttgctggcgctgggcgttacctggctggagtgcattaacggcggggatcatcctcggttcctggtgggcctactgcgaactcggctggggcggctggtggttctgggatccggtggaaaacgcctctttattaccctggctttctgccactgcgctgctgcacagtttgtccctgacacgccagcgggggattttttgccactggagcctgttgctggcgatagttactctgatgctgagcctgctgggcaccttaattgtccgttctggcattctggttagcgttcatgcgttcgcgctggataacgtccgcgccgtgccgttgttcagcctgtttgcactgattagccttgcgtctctggctctgtatggctggcgagcgcgggacggtggcccggcggtgcattttagcgggttaagccgggaaatgttaatcctcgctacgctgttgctgttttgcgcagtgctactgatcgtgctggtgggaacgctttatccgatgatttacggcctgctgggctggggacgcctctccgttggcgcgccgtattttaaccgcgcgacgttaccgtttggtctgttgatgctggtggtgattgtgctggcgacgtttgtctctggcaaacgcgtgcagcttccggcgctggtagctcatgcgggcgtgctgttatttgccgctggggtcgtggtctccagcgtcagccgtcaggagatcagcctgaatttacagccgggtcagcaggtgacgctggcaggatacaccttccgttttgagtgcctcgatctacaagccaaaggcaattacaccagcgaaaaagcgatagtggcactgtttgaccatcagcaacgcattggtgaactgacgccggagcggcgtttttatgaagcacgccgtcaacaaatgatggaaccgagtattcgctggaacggcatccatgactggtatgcggtcatgggggagaaaactgggccggatcgttacgcttttcgtttgtatgtacaaagcggtgtgcgctggatctgggggggaggattgttgatgattgcgggcgcattgttaagcggatggcgggggaagaagcgcgatgaataaagggcttctcacgctactgctgttatttacctgttttgcgcacgctcaggtcgtagacacctggcaattcgccaatccgcaacaacagcaacaggcgttaaatattgccagccagttacgttgtccgcagtgccagaatcaaaacttactggaatccaacgcgccggtggctgtcagtatgcgccatcaggtttacagcatggtggcggaggggaagaacgaagtcgaaatcattggctggatgaccgaacgctacggagattttgttcgctataacccaccgttaacgggtcagacgctggtgttatgggcgctgccagtggtgttgttactgctgatggcactgatcctctggcgagtgagggcgaagcgatgaaacagcccaaaataccggtgaaaatgctgacaacactcacgatattgatggtatttctctgtgtcggcagttatctgttaagcccaaaatggcaggcggtacgtgcggagtatcagcgtcagcgcgatccgctacatcagtttgccagccagcaaaccccggaagcgcagcttcaggcattgcaggataaaatccgcgctaatccacaaaacagcgaacagtgggcgttactgggcgagtactatctgtggcaaaacgattacagcaatagcttgctggcgtaccgtcaggcgttgcaactacgtggtgagaacgctgaactgtatgcggcgctggcgacggtgctttattaccaggccagccagcatatgaccgcccagactcgcgcaatgatcgacaaggccctcgcgctggacagtaatgaaatcaccgccctgatgctgctggcttccgatgcgtttatgcaggcgaactacgcgcaagccatcgaactatggcaaaaagtgatggatctcaacagtccgcgagttaaccgaacacagctggttgagagcattaatatggcgaaattgttgcagcggagattggattaatcatctggtgatgaagattatgtcattgagctgcataaaaaataatcgaatgaacatatgccaaaaataatcactaatcagtattattgcagattaaacaaataaaaatctttccataacaaatggttattcattaatcctgccataaactcgcgttattatgcattaatgcagcgaaaagctctgttgttaaagggttgcgcaacataccgcgcaaatgatactgatcataagcgttaaaaaaatctacaaaccaacgcaacacaattcatgccccggcagtatgtcacgttctcgcgtttctgaacggggaacggcgctccattgaggaagtcattcatatgaaaaatataaaattcagcctggcctggcagattctgtttgctatggtgctgggcattctcctgggaagctacctgcactaccatagcgacagccgcgactggctggtcgtcaatttgctctctccggcgggtgatatcttcatccatctgattaaaatgattgttgtgccgattgtgatctccacgctggtggtgggtatcgcgggtgttggtgatgccaaacagctcgggcgtattggcgcgaaaaccattatctacttcgaggtgatcaccaccgtcgccatcattttggggatcactctggcgaacgtcttccagcccggtgccggggtggatatgagccagttggcgaccgtcgatatcagcaaatatcagagcactacggaagcggtacaaagcagttcccacggcattatgggcacgattttgagcctggtgccgacgaacattgtggcgagcatggcgaaaggcgaaatgctgccgatcatctttttcagcgtgctgtttggtctggggctttcttccctgcccgcgacgcatcgtgaaccgctggtgaccgtgttccgctccatctctgaaaccatgtttaaagtgactcacatggtgatgcgttatgcaccggtgggtgtgtttgcgctgattgcggtgacggtggctaactttggtttcagctctctgtggccactggcgaaactggtgctgctggtgcatttcgccattctgttcttcgcgctggtagtgctgggaattgtggcgcgcctgtgcgggttaagcgtctggatcctgattcgtattctgaaagatgagctgattctggcgtactccactgccagctctgaaagcgtgctgccgcgaattattgagaagatggaagcctacggagcaccggtgagcatcaccagtttcgtggtgccgaccggttactcttttaaccttgatggtagcacgctgtatcaaagtattgccgctatcttcatcgcgcagttgtatggcattgacctgtccatctggcaggaaatcattctggtgctgacgctgatggtgaccagcaaagggattgctggcgtgcctggcgtgagctttgtggtgttgctggcaacgctgggtagcgtaggtattccgctggaaggtctggcgtttattgctggtgttgaccgtatcctcgacatggcgcgtactgcgctgaacgtggtgggtaatgcgctggcggtgctggtgattgccaagtgggaacacaaatttgaccgtaagaaagcgctggcttatgagcgtgaagtgctgggcaaatttgataaaactgcggatcaataattgaagattgccggggatatccacccggcaatgtgtgaatgcctgatgcgacgcttgccgcgtcttatcaggcctacgccagacagcgcaatagcctgatttagcgtgattttgtaggtcggataaggcgtttatgccgcatccgacatcaacgcctgatgcgacgcttaacgcgtcttatcaggcctacgccagacagcgcaatagcctgatttagcgtgattttgtaggtcggataaggcgtttacgccgcatccgacatcaacgcctgatgcgacgcttgccgcgtcttatcaggcctacgccagacagcgcaatagcctgatttagcgtgattttgtaggtcggataaggcgtttatgccgcatccgacatcaacgcctgatgcgacgcttaacgcgtcttatcaggcctacgccagacagcgcaatagcctgatttagcgtgattttgtaggtcggataaggcgtttacgccgcatccgacatcaatgcctgatgcgacgcttgccgcgtcttatcaggcctatcttaaccgttggttaatttttcaaactcttcacacccggtatcaaacccttccatacagctcaggttcaaccagtgcagcgccttttgcttgttcttctcgataaaaccttcttcaccgtttaagaacatcattcccgcccagtactcggaataaccggttcgggaaattgcagagctgcgtttgaaataccaggttgccttgtcatcgtcggccttaatgcccacgccgttggcgtaaatcaaaccaagcagcatttgggcatcgacggcagagtcgttctccagatcttcgctggcgttttctaacaggctaattgcctttggataatccggtttacccgcttgagtatttaccagaatatgcgccagcgttacttcaccttctttactgcccgcttgcgccgctttctctgcaagaacttttgcttgtggatagtccagactgaccggattggtgattttgatctgcgccagcagcgcgcaggcatcagcatcaccgctgtcggcggctttctgtgcccaatattcggctttgctcaaatcgccggagctaaaccagctgtcggcaagaaaatattgtgcgcgtcggtccccggcctctgctgcctttaaatactggctgccaggctcggagtcgttggcgtgggcaaagaatgtcaaaaacaacatcaatgcgataatttttttcattttgataatacgattgggtagggagtaaccagtataaagagttcgaatggataaaaaaacagcctccgaaaggaggctgtagaaaggacggtattacgccagtgccgcttcgcgcaggcgagttttcaacttgttgtactcgtcaatcacgtactgctcggcggcgcgctgatcggcgatcggctcgacgcgaacggcgcagtatttgtactccggcgttttcgtaatcgggcttaagttttcggtaaccagctcgttacaggcaccaatccaccactggtaggtcatgtaaatcgcccctttgttcggacgatcgctgacctgcgcacgggtgataattttgcctttacggctgtgcacccaaaccaatgcctcatcttcaatacccagacgtttggcgtcttcggtattgatttgtgcgtagccaggttcatcagccagcgccgccagtgccgcacagttaccggtcatgctacggcaagagtagtgaccaacttcacgcaccgtactcagtaccatcgggtactcgtcggtgagtttgtcgattggcgctacccagtcgcaggtgaagaactgcgccagaccgttcggggtatcaaacttctctttaaacagataagaagtcccctgatcggcatcactagtatcgcggcaaggccactgaatgaagcccagttcgcccattttctcgtaagtcgcaccgtagaaatccgggcacagatgacgcaactcatcccagatctcctgggtgttgttgtagtgcatcggataacccatacgggtggcgatttcactgatgatttgccagtccgttttcagatcccatttcggttcaaccgccttgaagaaacgctggaagccacggtcagccgcagtaaacacgccttcatgctcgccccagctcgtactcggtaaaataacatccgccgcgctcgcggttttggtcataaagatgtcctgaacgataaccagttccagatcttcaaaggctttacgtactgcgctcagctccgcgtcagtttgtagcggatcttcgcccataatgtacgcggcacgcacttcgccatgcgctgcgcggtgcggcagctcgctgatgcgatagccggtatgcgctggcaggctttccacgccccaggctttggcgaatttctcgcggttagccggatctttcacgtactggtatcccggatacgtatccggcagcgcgcccatatcgcaggcaccctgaacgttgttctgaccacgaaccgggttaacacccgcatgcggcttaccgaggttaccggtcagcatcgcgaggctggtcagagaacgcacggtttccacgccctggtagaactgggttacacccatgccccacaggatggcggcgcttttcgcctgggcatacatccgtgccgcctgacgaatctcactggcgctgacgccggtgatatcttcaacgctctccggcgtgtagccttcaacgattttacgatactcttcaaagccttctgtacgactagcgacgaacgctttgtcgtacagattttcttcaataatgacatggcccatcgcattcaacagcgcgatgttgctgccgtttttcagtgcaatgtgcatgtcagcaatgcgcgcggtttcaattttgcgcggatcgcagacgataattttcgccccgttacgtttagcgttaattacgtgattcgccacgattgggtgggaatccgccgggttgtacccgaaaacgaacactaaatcggtattatcaatttcgttaatagcattgctcattgcgccattaccgacgctttggtgcagacctgcaacgcttgggccgtgtcagacacgagcgcagcagtcaacgttattggtaccaataacggcgcgcgcaaatttttgcattacatagttggtttcgttacccgtaccacggctggagccggtcgtctggatggcatccggaccgtacttctctttgatggcgctcaggcgctcggcaacgtaattcagtgcctcatcccaggaaacaggttcgagtttgccgccacgctggcgacggatcatgggggttttcaggcgcggggtcaggatctgggtatcgttaatgaagtcccagccataataacccttcagacacagggtaccctggttggttttcccctgcgctgcctccgcccggacgattttgccgttatcgacgaccaggttgattttgcaaccacttgcgcaataggggcaaaccgtgacgacttttttcatcggtctcgctccagttaatcaaatcacgcatacgcgctctcgactacagtatgcatcttttatgccacattttatgtggggtcattccctgatattacgggcactatttattcaaaactctgacgaaaaacaggctgtcgtcagttttgacgtgacgaaacgaaataccgcgtgacagccatcacgcggcagacattttattttttctcgacgacgggacctgcctgatacccgccgcccaggcttttcatcaactgaatgctttggatcacccggcggctgtccagcatcagtaaactcatctcttcggcaagcactggcaaccgggcttcggtggcctgtaagcggctggttaagccgcgctgataggcggcctcggcagcgcgctgggtaaagcgcgtggcttccacgcgttcagcctgcatttctcgctcgtcgttgagcgtttgcagacgcgtgccgttgacggcaacgtcacgcaccgcgttcagtacactctggttgtaacgttcaatcatcatgttgctggcggcgcgcgtgccttcgagattggcattcaaccgtccaccgtcaaacagcggcaatttcagacccgggatgaagttgaactggcgactggtttttttgaataaggtatgcagatggatggagtccagaccgaaaaacgctttgatatcaaagctcggatagaacaacgcccgcgcggaatccacctgatctaaactcgcctgaacataccagcgcatggcttgcagatccgggcgtctggcgagcaactcataagagagtgtcgccggaatgccggtctggacttgcggtaatgccaccggtctgatctccggcatatcgctggctcccgcgccaatcaatgcacgcagagattctcgcgtttcggtgatttgccctttgacggcaacaatttgtttatcgaccgccagaatctgtgcccgcgcgccgtggaaaggcacttgcgcttccagaccgtgcgccactttactctggtgcgctttcaccgcgtaatcaatcacatcgtgagtttgttctaacagatcgagcatctgatagctggcctgcatactgtaataaagctgcgctacgcccgtggccaggcttagctctactgctgcggtttctgccagcgcggcattatgcgcgccaatggcggcggcaaccgcactgcgatgcacaccccacaaatcaagatccagtccggcaaacaaacctactgtggcttccgtatagtacggcccgtccatacccagtgctggcgcatccatactataagggcttaaaaagccgttcgcgctgacacgttggcggttgagcatccctaacgctgcgacctgtaattgactaccggcatctaacaaatcggcctgggactgcgctttttcttcccgcagtttcgcttcggcgagggtgtgactaccacttagcgtccgttggatcagcgcatccagctgcgggtcattgagttgtttccaccactgcgcctgcggccagccggagctggcaagatgaatatcgtcggccagtttgatttgttccggtttgagctgttgatgaggtgcagaatccttacgtaccagggcacagccggaaatcagcgtcgtgctgccgagaatgctgcacaacagcagacgactaagttgacgattgatcattgcgtggctccttgtgcctgttccgtggcgggcgttaatgccggggctgtccagtctggcaagcgggcgaaaagctggcagacgtgttgctcctgttttaataaggtgggcaggatggcctgagaggcgggtgtctcttcaagcgttatttgaggagaacggctgagtgcggttgccagaccggcagcgtatttctccagggcgtcggcaaactgacctgctctgtccggctgtagtgcgttatccagcgcctgcgcgctgttccaggtggcatcccaggcgtgaagaagatcgcggccctgacgaataaccgtttggctacgttcaatcagtaatgcgcgttcttcgctgtccagttgacgctccagcgccacgcgttggcacatctcttcacaggcattaaacgccgcatgcagaccgatacgaatttgcagataagtgcgcagagccgtgacttcctgctggcgtgggatccgcattactttacttaacatacccagcgtgccagccagtttttgcggcagtgtgcgcgcttcactttcaggccagacaaaggtgtaaatcaccgcggacaccacggtaccaatgatgatacccagggcgcgatcgcgaatttccaccaggtcgtacactgggccaaaaacgttttcgagcgtggcgagcgcgaaggtgaccaccatctgtgtgccgatataagaagagcgttcagagctggtggcaatccatgcgcccaacaggaaaatcggtgccagcacaaacagcaattcgacaatattgtccagccagggcatgaccagtagcgtgaataacagcgccagaatcgcgccgcaaaaggccccgccaaaacgcagcaccatcttctggtagctgctaccgacatttgggttagcgacgatcacgcatgtcagcatacaggtgtgaatgccttcccagtccacgccgctgtaaaaggtgtaacagatcaaacaggcgagcagcgtttttaccgcgtagcgcatatagtctggattggtaaaagcatcggcggccatacttggcggtttggctgcgggcgttggcggcgtattcgggtccatctgacccagttgtaacaacgtctggcagatattctccaggttacattcccgtgccgccatcgcttcactttcactgatccgccagtcgctttgccagcactgaccttcagcaacggcatgctgcagcttgttgatttcactagctaatttttgtcggaattcaataattgcctgagaatcagcaaaagaggtgggatcgtagcgattcagcgtgctgtaaatgtaggttaccgttgccacgcagctttgccaccatgcgttttgagttcgccagttggcatcgtccgcgaggcaaaagacattgagtttttgtagcgccagcgcctctctttcaatccgcgtttcgggtagcggtgcgaggctgtctgtcaggtgactaatggcatcatcaagccgatcattaagcgcctgatgcatttggctaatggcacgactgggaaaccacagcacgccgattaacgtcatcagcaaggttggatagaggccaacaacgatacaccacagcgttaagcgcacgaccacttccggatagtcgagcatggcggggaaggtttgcccgtaaatagcgacaatggcgacggcgaaaaagaccagccccaagcgatgggtgcgcatcaaaaacatgcagcccatcaggatcggtccggcgatgatcaatcggatcaacggttcgccgtaactccatttgtagatcaaaaacaggctgccgatctccagcaccgtggcaaccacaaacaagatcgcgacaaatttggtgtaaaacgcgttgctctgaataccgtaaaacagcactgccaggcttaacgccacaaaagggatctcaaaggtcatgctgatcagaatcaccagcaggcagcctacccagagttgcacggtctgcggcacgcgacctggtcgccgctcgcttaactcttcatgaaagaacgccagcagcctgaccaccggtaatggcagggagttgagcgcgctcattattgcggctcaagattagcgactgcgctagcgccgatgcggaacatttccgggtcaggtttatcgaccatgattttgaccggaaaacgctgggcaacgcggacccagttaatagaacgagacactttcggcaggccgcccagcaccaggccgccgtcatccggtagcacgccgtagccaatgctatccactttaccctcgaaggttttgccgctgtcactcatcaggcgaatcgttgcgggtgtaccactgcgaatatttttcagatcggtttcgcggaagttggcgatcacataccagtgacgagtgtcgattagggtaaaaatagggcgcatggcagaagcaaattgcccgacggaggttttgagggaaatgacccggccatcaaacggcgcgcgaacggtcgccatttccagatgcagtttggtcagggcaatatccgcttcgaccgccgcacgctgggcaactaatgcatccacgccgctgacggcgctggcggcactctgcgcctgtaacaatacggcattaagatccgcttctgcggcgcgctgcgccgttcttgcacggtcaacatcttccgcactgacaaaaccttctttcagtaatggctcggtgcggcgtaatgtatctgtggcctgtttcgcggcggcacgggctttttctaccgtggcattaacgctgtcggcaccaaactgttgcgcgtcaacgctacgctgggtgagcataatttgcttatccagcgccgcgagggaggcttcagctttcgccagattggcttcgtacgggcgcgggtcgatgcggaacagcaaatcgccctgtttgactgcctggttgtcggtgaccgccagttctacaatgcggccgctgacttccggtaccacatcaatggtatctgcactcgcgtaagcgtcattagtacttggcgcactgtctacgcgccagataacgaaaacaagggcaaccagcgccaacgcaaccactaacagagcagggaatttactgcgaggagcttttttcggcgtactttccatgagcgcgtctcaaatagattagaaaaatgccagccagaacagcatggcgtagagagcaaaaagggcggtataaataattccgacaaatgccagattgatatttgcccgctgaataactcgcctcgtgatgagcgtcaaaataaggctggcaatggcgcagaaaaaccagctgggataataagcgccgatcaccgggattgccggagataatgagcatcccgaaaccatgaagacgggaattatccaggctgtttttttgagttgcatcgccatgcgagagagaactgttggcatattaaatacatcctgtctgctgcgaacaatatctgtagtgaatatcaatatccattgaaggcgtcagtatggctattttcttgatgaataaaaatagctttattcagccaccgcattcataacttatatattttatttattaattggctgtatatatttttaaaataaatacttttgggggcttcagcgcccccaaaagcgagtgacattaatttggggttacgatattcacccacaaatcgaaattatccagacaggcgataatttcttccagtttcgcgccattgccaataattttggctttcttcgcttttaccagatccgccattttggcttgtccggtcagcacggcgtgcagatcttcacggctgatgtagaaagaggcgtcggcttgcggttgcagcgttttccggtagttaagcacgctatcgttcagcgtcaggttgaggttatcgccgttgctcatattgaagttcaggctgatatttttacccgcagctttcgcgctatcgaggcgaacggccataaagtcgaacagcatttcgacgctcatcccgcgaatggtgtccggggaaccggtggtgccgtggctgaacttatgcaccccttcgcgcagctctttcgcgccggtcaggtagaaaccgcgccatgtggcggactcggcctgatagcccagctgttcaaagttattcgcttgcagattcttcgcgacctggtcacccgggttggcggcaatcacctgtttcagcagttctgcgctccagcggtaatcaccttgcttgttcgcttcttgcgccaggttgatgacacgggcagaaccgcccagcgcctgcacgtaacgtttacccatctccacctgaccatacggatgcaggttagccgggttaccgtcgtaatagccaagatagaagttatacaccgcgcgggcgttgtggctgacagaaccgtaatagccgcggctggcccagttattggcaagtgcaggcggcagcttaatcatgtcgccgatttcattcatggtgtagccctggttcgccaggtgcagggtctggtcgtgaatgtacttgatggtatcgcggtatttaccaatataatcattgatatgcttattgccccagaccggccaggtgtgcggcataaacagcacttccgcgtcgttaccccacatatccagcgtttcgttcagatactcggtccacttgctggtgtcgcgggttttcgcgccgcgcagagtgtagaagttgtgcagggtatgcgtggcgttctcggcggtacacagggctttcagggccggaatatagaagtgcatttcggctggcgcttcgctacctggggtcatcaggaagtcaaactccaggccgtcgataatcatcttctcgccagttctgacgatagttttcgtcggtgcaataatgctcgggtcgcccgttgccagcgtcacgccaaggccattacccacattgccttgcgcgttgtgcggcagtaacagaccgtaagagtagagcgcacggcggctcatgatgttacccgccagcacgttttcgctgatggcttcgtccataaagcctgcaggggcaatcacctgaactttgccggatttaacatcggcttcagagataatgcctttcacgccaccatagtggtcggtgtggctgtgagtgtagataacggcaacaatcggtttttgcggacgatgctggaagtaaaggtcaagtgcggcttttgcggcaggcggcgtcaccagcgggtcgataacaataatgcctttctcgccctcaacgaacgtaatgttagagatatcctggccgcgcacctgatacattttatcggtgactttgaacaggccagaaataccgttgatttggctctgacgccacaggctggggtttacggtttccggcgctgcggcattaatatcaaatttgtaatcgtccgcgcggtagtaaactttaccgttcgcatcacgcagaataccttcatccagcagcggggcgataaatccacgctgggcatcgtcaaaatcctgacgatcgctaaacggtaaacttttggcgtaattctgattaacctgttgggtatattgagtggcggctttcgcttcctctttcgcgttagcggtatttaccatcatgccgctggcggcagttaacgcaataacaatcctgctcaaacggaataaccgagagttattcatataaatctccatttatcatttatgtcgtaaatatgtaatccatgcaaaatacgtcatttaaagctggcgttatcataattgggaaattgcgactttaataagtggaagtgtgagcggaacgcgccattttattaggcatttgtgctgaagagggaaaattacagtaaaactatcattgcagaaaataatatgagtcgttttatgtgtttattatatatattgtacctgtcgttggcacagcgggacattgcgctactgtgccaacgttttactcatggggctttagcacagaactgtggcaaaaaacgttgatgcgccaatattgctgcaccctgagcgccattaaagtcagaagaactggcggcaataaagcgcacgacctgatgcggcagtggacggcgcaggtacttttgggtcatggcaacgagagtctcgcgtgggaaggcgggcatatccatcacgccaccgcccaggatcaccgcatcgggatcgaacagattaatgctggtggcaatggcccgtgccgcgttttcaagcagactctggacgaaaggggcgttttccgcatggacgaaaagatcgcgcaatgggtaatttcggggctgttgttcgtaccagcgtcttagcgccattccagagcaattggtttccaggcacccaggattgccacacgcgcagtgttgggtcatatctcccagggggatatgacccagttcgcctgccacaccgtgtgcacccgtccacggcgcaccgttcatccacactgcgaaccccatccccgtaccgagataggccgccagaaccagttgttgcgtaaggcggttttctactacgtcccaggagagttgcaggttaacgtcgcgggaaaactcaaccggacaattcagcgtattttcgagcttatcggcgagatcatataaatccgccgctgttaacggcaggttaggcgtagaaataatggtgcgtttatctttactgaccagcgccggaaatcccatcaccagaccatgacagcgagcgttaaagcgcctgagttgctcgtcaatcatttcgccgataccgctcaccaggccgggagcaatgacttctgcggtccgctttttttcgcagtgtagcgtttcaccttctgctgtccgcagacaaaagcggatatgcgttgcccccatatccacgcccgctacgacgttatgctgtttttgcatgaggctgtacctcgctttttgcagccagaatctgcgcggtcataattctccatgcttcgtcgatattttccgcatgattaaacaggccggaagtgccgacgataaagacatccgcccctgccgccatcagtttttcgtaagttgcctggttgcaggaaccgtccacctcaatttcgtactccagaccttctcgttcacgccatgccttcagttcggcaagtttatccagcatttcaggaatgaacggttgtccggcaaagccgggatcgacagtcatgaccgtaattttatcggccttatggatatagtatttcatggcctcaactggcgtctccgggttaaggatcagccccactttcatgtcatgacggcggatttcatcaatcaggcggaacgcctggccgttgatggtttccggatgcagagtgatgaaatctgctcccgcacgcgccagttgagcaatgtaatcctgcggccgcgtcaccatcagatgacagtcgagcggtttagttgccagttttttaacctgacttacgaagaacggactgagtgtcagattggggacaaagtgaccgtccatgatatcgatgtggaagtaatcggcatggctgtcgataaattcgatctgttctttaaatttcagcagatccatacacattaagctgggggagattttcatgttcaattccttacttactgataagacggtcaagggcgacagccgcgataattaatccgcccatcaccaccagttggtaataggtttgtacctgcaaaatattcagaccgttgttgatggtgccgatgatcaacccgccaatcaccacagagaaaatgcgccccttgccgccgaagaaactggtgccgccaatgatggcgctggcaatggcataggtttcaaaacccataccggcaagcggttctgcggcaccgagtcgtgcagtactgacgacgcctgccagacctgcacaaacaccggagatgataaacaccaccaggatgtggaatttcacgtcaatcccggaatagaacgcgctatttttgttgccgcccagtgcgtagatgttgcgcccgagccgcatacgcgttgtcagaaaccaaaggatgagcgcgacaattagactgaagataacggggacaggtatcccaattacgctggcggcaaagaagttcacgaagtcaaaactgaagccgtatacgctgttggcatcggagatcaccagcgtgatcccacggaaaatcgcgttggtgccaagggtgatgatgaacgggtgtagccccgtccagttgaccaggcagccgttgatcgcccccagtgcgccgccaaccagtacaccgccaatcatcgctgcgagaaacgggtcaacacctgccaacatcagtttggcggtcaccataccggaaagcgccagaatcgcgccaacgctgaggtcgataccagcgaccaggatagcgaaaaactcgcccatgccgatcaataccgtcacggagctttgaacaaaaatctgggtaatattattggtggtcagaaaatattctggactcaggctaccaaagatggcgacgatgatcgccaggataaaaaaggtgccgtatttatcccagaacagcgcaaagttgaacggtttcttctcgctcgcttcgctttttactcttgtggtaaagcccatgccataatctcctcttcgctcatgtcatcgcgattcgtcaggatttgcgtcagtcgtccttcgcagaacacggcgatgcggtcgcagacggtgataatttcaggtagttcagaactcaccatcaggatgacttttccgtcgtccgccagttggcgcatcactttgtaaatttcggctttcgcgccaacgtcgatgccgcgggtaggttcatcgaaaataatcacttccgggcaacagcacagccatttggagatcaggactttctgctgatttcccccggagagttcggtgatattctggtttacgctatgacatttcagcgccagcagttcgcgttgattttcagcggtacgttgctcgtcaacttcatgaaacaagcccatcgcgcctttatagccgccgtctttcagactgcggctgatcgccatgttctgagcgatggaaaagttggggaaaaaaccgttatcccggcggctttcagtgatgtaagccatcccttttttcacggcatccaggggactacgtggagagatatctttgccattaagacggatttctccgccagcgcgtttatccacgccaaacagacaattcatcagttcagtacgtccggaaccgaccagtccggcaaagcctaatatttctccccggcagacgctaaaactgatatcccggaccttttttctgtcacgactggtgacgttccgcacctcaaaaaccgtttcgtgcgcaaggttgctgacattctccttcatcgcgttaaaacggttttgcagttcgcggcctaccatcagacggacgatatcgtcattactcacatcgcttactatgccgctgcaaacgctgctgccgtctttcatcaccgtatagcggtcgcaaatacggcgaatttccgccaacttatggctgatatagacgatggccgtaccctctttacgcaactgattcatgatcagaaacagatagtccacctctttattggtgagactggaggtgggttcatccatgatgatgactttggcatcgagcatcagcgttttggcaatttctagcatctgcttgtggctgatagataaattcgccactttctcatctagatcaactttcaagcccacgcgtaataacatcatggcggcgcggacacgcatttctcgccagtcgataatattgacgccacagatttttttcgtcagatgacgaccaatatataaattttccagtacggttaattcatcaataacgctgagttcctgataaataatcccgataccgagttgtgccgctaatttatgatccagcttgttatagctaatgttattaatggtaatggtgcctttggtcggctcatgtattccggataaaactttcattagcgtggatttacccgcgccattttctcctagtaatgcatgtatttcaccaggataaaccgttaaattaacgctctttaatgcgtgaaccggaccaaaggacttgccgatccccgccatgcttatatatggcgtggccataaataacctctctgcacgaaatatcgtattattgcctgatggctacatttatcaggtctacgttcaggttattttgttggccggataagacacttcattagcatcatcatccggcatcattcagttttattgagtgaccaggatactatcgaccagtttaaattccggtgctttatccagcgggataaccttgccggatttctcagcgtcaaccatcagcttcagacccgttgcgccgatatccgccgggttctgggcaaccgtcgcggtcatttgtccggcttccaccattttgcgggcttccggaatgccatctgtaccgacgaccagcacttttcccgtttttccggcgtttgcgactgcctgagcaacacccattgccatcgtgtcattcgcgcaatagatcgctttaatattcggattacgttgcaacacgttagtggcgacatccagtgctttaatgcggtcccagtcggcaggctggctggcgacaagcttgatctggcttgcttttttgaaggcttcggtggcaccattacgacgcgcttcaccggaggcgttaccggctttaccctcaatgattgcgacttcaccaccttcagcgcccaatttgtcaataatgaagctcgcgcctttcgccccgacagcaacgttatcggtggtgacaaaagcttccacattgccgccagcttttttcagattatccatgtcgattttttcatcgagattaaccagataaatgccttttttccatgcgcgggcgacaggcatgaccagattcacactggataatggagcgaaggcgatacctttgtaatttttattactgagatcttcaaataactgcaattgagattgaaaatcgccttcactaggagaggcaaaaatatcaacgctgacgcccagtgtttttgcttcatcttcaatgccttttttcatatctacccaaaatgggttggagagggttttcaatacgacagcatattcggcggcagcaaaagcgctggtactcaacattaagcccacgagtgtgccgctgaaatatttcagatatttattcataataatgttctcacggtaaggggacaggtaactccgcgatggcggaattacctttttcttatttcagcgcgcctggactgaagaaatcaacaattgcgccggttttttgcatattaatattagcttgttcaatgttgagctgggcgacagagacaaaaaaagcgtccagcaaagttagttgtaatattcttgcgctggcattacgacctaataacggcgtttccggggctggactgcaaataatataatcggccagtttcgctatcggactatggtagctatgggttatacaaataatctttgccccgttcttttttgccagttctacggccgcttttacatcactggttcgcccggaatgggtcactaccagcacaacatctccttcctgtaacaagctagcggacatcatcatgatgtgagcatcaggataggcctgacagcgtacgccaatgcgcaagaacttgtgctgtacatcagcacagatagcattacttcctccggcaccgtacaaatcccgctgtctggcctgatagaaaaagcgggcggcacggtggatctcatcaacgttgacgatgctctgaccttccataatggtgcgtaaagtgatgttaaataccttattcaccacatcctgcggcgcttcatcaaaagccaactcggaaggcaatacctgttcactctgagaaaaataatcttccagcgcactgcgtaagttacgaaagccgctaaaccccagcagcttacttaccttaactatcatcgcttcagataccgccagagcttctgcgacatctttaattgcgggtgcacaactcaggttaccgggtttgagtaaccactccacgatgcggctttcattttctgtcattccttcctgcttcattcgcaggtaaggcgctaaccctataccgttcggaagcgcactatcaaactcactctggctcatcacgttctcttgtccttgaattgaagacgccactatatcaccacagcaagaacagaaaagatgctggcgacttcacaaaaaaataaaatttataaagtttattttattgtgaacaatggcgagtggcttaaaattttatttcatttaattagtttaaaaacatgatgttatttgtttttctggttttttagatgatagatgttgctggatggtgagtgtctttaacgctattgcgctgtcagatgtaactctgtaaaacagatcaggaaggcgtaattcatcgattttgggtgtttttaattcattaacatcacaaatgttttttgattgtgaagttttgcacggacggggaagatgaatgaaaaagattgcatttggctgtgatcatgtcggtttcattttaaaacatgaaatagtggcacatttagttgagcgtggcgttgaagtgattgataaaggaacctggagcagtgagcgtactgattatccacattacgccagtcaagtcgcactggctgttgctggcggagaggttgatggcgggattttgatttgtggtactggcgtcggtattagcatagcggcgaacaagtttgccggaattcgcgcggtcgtctgtagcgaaccttattccgcgcaacttagccggcagcataacgacaccaacgtgctggcttttggtagtcgagtggttggcctcgaactggcaaaaatgattgtggatgcgtggctgggcgcacagtacgaaggcggtcgtcatcaacaacgcgtggaggcgattacggcaatagagcagcggagaaattgagattcatccactacttgcatggatgagtaatgattaatgtggatagagtttctttttgaggttggctaatgaaacgctttccgctatttcttttattcaccctgctcacgctgtccaccgttccggcccaggccgatattatcgacgacaccattggcaatattcagcaggcgattaatgacgcttataaccctgaccgtgggcgagactatgaagatagccgcgacgacggctggcagcgtgaagtgagcgacgatcggcgcagacaatatgacgaccgccgccgccagtttgaagatcgccgcaggcagctggacgatcgccagcgccagcttgatcaggagcgtcggcaactggaggatgaagagcggagaatggaagatgagtatgggcgatgaggttgggtatggagcaggcatcgcccctcaccccaatggggagagggagaaaacgagcgcaatattcaatatcgagcacaatcggtcccctcgcccctctggggagagggttagggtgagggggccagcgcgcacattccctctcatcacgccaccccaatctccatcccatcaaaccccacctcaaacccactcggtagtgcgttttccatcagccacgcatcaaactggtggctgatatgggtcagaatcacccgtgggctgcggataacctgattcagcgcaagcacggtatttaaatcacagtgattacgcggtgcatccgcgcgcggcgggtgactgcaatccatcaccattacctgcggctgattattgcgtaaaaatttcagcgttttttccggcaagcctgcggtgtcagacagccacgccacccggctgtgtgccgtttccagcagataaccgaaggtcagtttactgtggttgagcggcaggggcgtgacctgtaacccctgcaaatcaaacaccacaaacggttccaccgtgtggctgaaatcaagcaggcccggatgtttaaacagatcgtcgcagccctgttcatccggcgggccgtaaaccgggatcggatcgccaacgccccagcgcagcggaaacagcccctggacgtgatccatatgataatgcgtcagcaaaaactgctggaagcttccggggctccagcgatcggcgagatcgtgcagcccggcgtcgatcagggtgattgcgtcgttaaacttcactacgccgctgcacggttggcggcgatactgcgggctgcgccgcgctctggcgcaggccgcacactcgcagccccatgccggaacgccctgtgcgccgccggtgccggtgagcgtgagggtcaggctcatgttacagcgccttggtgaagcggaagtggctctgctcgtagccttcgcgcagatagaaacggtgcgcgtcgtggcgcttcacgttggtgctaagttcggtcatttcggccccggcctggcgggcttcttcttctgcccacgccagtaacttactgccgacgttcagaccgcgcgcctgcggcattaccaccaactcctgaatttcgccgatccagttgacatgatgcagatgaaactgcaaatgcaggccgatcatgccgacaacttcgccatcaagcagcgccagatggtagcgcatgtttgggtcgcgcagattggcgttaaaacccacgcgaaacgcgtggtggtcaaactccgcctgttttagctcacaaatcagcgcgtaaaccgcgtcggtgtcgtactgcgtggccgggcgaagctcacaagcaggcatggtgtttctccttctgatggatcagcgtcagcagcgtgtcgacgctctggcgcaggctgccgtcattgttgagcgtatggcaatcctgtggagtatagcgggcggcgcgcgccaggcgggcgttaatttcactggcgttttcacggccacggttttccaggcgctggcggaggatctccgggctaacctgtaaacagacgggcagcagcgcgctttgatagcgcgcccgcgcctgcggcagatgggcgcgactgccgttgaccagcacgtcgaatccggcgtgcagccagagatcaatctcgacgccgacgccataatacagaccgttagcgtgccagcttaaggccaacagattttgccccgcgcgggtaaaaaactcctgctcgctcagggcgatatggttttcacttccggcgctggcatcgcgcgtgatgtagcgatgcgccaccagtaactgagtttgttcccgcaggcggagttccgccagcaggctgtctttcccggagccggacggccccattaaccaaatcagttttcccatcatcagaacacccttttaccctgacgccagacgtggtcgatatgaatatgattgtccttgcgatgcgccagcaccaggtcggcgcgtttgccctcgccaatcaccccgcgatcctggagattaagcgcctgcgctggatttttagtcaccagcttcaccgcctgcggcagcgtaaagcggttgctctggtcatcggcgacgcgaaatgccgcatcgagcaggctggcggggtagtagtcggaagagaggatatccagcaggccaagctgcgccagttcactggccgccacgttgccggagtggctgccgccgcgcacaatattcggcgcgcccatcagcacgttcatgccatgcttgcggctggcttccgccgcttcgaacgtggtgggaaattcggcgatcacgctgccaagctggtgagattcagcaacgtgggcgtgggtggcgtcatcgtggctggcaagcgcaatttttcgcgcgcggcacagggcggcgatggattcgcgattcggctggctccagcgtgcggcgagcgccagttgctcttcttcgtactgctgcatctgcgcatcagtgagggagtatttgccctgataatattcgcgatacttctcgcggttggcgaactggcgctggcccgggctgtggtccatcaggctcaccagcgtcaccggctcgcgctgcaccagtttttcaaacagcggcagcgtggtgtgatgcggcagttcgcagcgcagatgcagacggtgctcggcgcggttgacgccgcgtttctgcgtctcttcgatggcgttgatcatcttctccagattctccagccgatcgccgccgtcgcgcacgtcgccaattgccacggcatccagtacggtggtgatgccgctcgccaccatcagcgcgtcgtggctgctcatcgcgctgtgggcaggccagtcaactttcgggcgcggggtgaagaatttatccagattatcggtatgcagctcaatcagccccggcagcagccagccgccttcgccgtccatcgcctccggcaggcggctctggctttcggcaaaggcgcggatttcgccgttctgcacctccaggctaccgcttaccacctcgttttccagcaccagcttaacgttattgataatcatgaagaggctcccattgggtgttagctcaactagaggctcccattgggtgcaggcggtcggcgacgtcattacgtacagcttcgtcatggaagatgcctacgatggctgcgccacgggttttggcttcgcgaatcagttccaccaccgcggcgctgtttttggcgtccaggctggcggtaggttcgtcaagcagcagaatggggtagtcgacgataaagccgcgggcgatgttgacgcgctgctgttcgccaccggaaaatgtgcttggtgccaggtgccacaggcgttccggcacgttcaggcgggtgagaagacgcgcggctttagcggcgcaggcttcacgcggaacgccggtatcgagcagcggctgcatcaccacttccagtgcactgatacgcgggatgacgcgcagaaactggctcacccagccgacggtggttttgcggatttccaccactttgcgcgctggcgcggtgaccaggtctacccactcgtcaccgtgtttgatctggatttgaccttcgtcgggcagatagttggcgtacaggctgcgtagcagagtacttttgccgctgccggaatggccgtggagcaccacgcattcgcccgcgttgacggtgaggctggcgcgattgaggacgggcaggcgcacgccgttttgctggtgcaggatgaaggttttactgacgttttgtacgttaatcatttttcgcctcgtggttcgggtgtcggatgcgacgctgacgcgtcttatccgacctacggggagcgcatttgtaggccggataaggcgtttacgccgcatccggcaccggctcaattctgcaaaacgctactcaccagcagctgtgtatacggatgatgcgggtcgtcgagcacgcggtcggttaacccactctccaccacttgcccctgcttcatcaccagcaaacggtccgccagcaggcgggcgacgcctaaatcatgggtgacaatcaccaccgcgaggttcagctccaccaccaggccgcgcagcaggtcgagcaggcgggcctgcacgctcacatccagcccgccggtcggttcatccataaacaccagcttcggatgcgtcaccaggttgcgggcaatctgcaaacgctgctgcataccgccggaaaaggtggtcggcaggtcgtcgatccggttggcgggaatctccacctcttccagccacttctgcgcggtggcacgaatatcgccgtaatgacgtgccccggtcgccatcagccgctcgccgatattgccgcctgcgctcacctggcggcgcaggccgtcgagtggatgctgatgcaccacgccccattcggtacgcagcaggcgacggcggtcggcctcgctcattgcatacaggctacggttctcgtagtgaatttccccctgctgcggcgtcaggcgcgcggagatgctcttcagcagcgtggtcttcccggagccggattccccgacaatgcccagcacttcccccggccataaatcaaaagagacatcgctaaagcctttgcccggcgcgtaaaggtgggtcaggttattgacgctaagtaacggttgattcattggttttttgcctcgctctgttggcggcaataatcggtatcggagcagacaaacatgcggtttccggcgtcatccagcaccacttcatcaagatagctgtgggtgcttccgcagatggcgcatggctcatcccactgctgaacggtgaacgggtgatcgtcgaaatcgagactttccacgcgggtaaacggcggcaccgcatagatgcgcttctcgcgccccgcgccgaacagttgcagggcgggcatcatgtccatttttgggttatcgaatttcgggatcgggctcgggtccatcacgtagcgcccatttaccttcaccggataggcgtaggtggtggcgatatgaccgaagcgggcgatatcttcatacagtttcacctgcatcacgccgtactcttccagcgcgtgcatggtgcgggtttccgtttcgcgcggctcgataaagcgcagcggctcggggattggcacctggaagataattatctgatcttcggtcagcggcgtttcggggatgcggtgacgcgtctggataaccgtcgcatcgtccgtacgttccgtggtgtttaccccggtcacgcgcttgaagaagttgcgaatgctcacggcgttggtggtgtcatccgcgccctggtcaatcaccttcagcacgtcgctttcgccaatcacgctggcggtaagctgaatgccgccggttccccagccgtacggcatcggcatctcgcgcccgccaaacggcacctgataaccggggatcgccaccgcttttaagatggcgcggcggatcatgcgtttggtctgctcgtcgaggtaggcaaagttgtagccgctcagattagccatggttctgctcctgttgcagacgtttgagtagctccagttcggcctggaaatcgacgtagtgggggagtttgaggtgactgacaaagcctgcggcttcgacgttgtcggcatgtgccagcacgaactcttcatcctgcgccgggcctgtcgcgtgctcgccgtactccggggcttgcagagcgcggtcgaccagcgccatcgccatcgctttgcgctcgctcatgccgaacaccagcccgtagccgcgcgtgaagtgcggcggctcacccggcgggtcgataaaaccgttaaccatttcacactcagtcatcagcagttcgccgacgttcaccgcaaatcccagctcttccggcacaatgctcacgtcgatatagccgctgcggatctcgcctgcgaacgggtgattgcgcccgtaaccgcgttgggtggagtaggccagcgccagcaaatagccttcgtcgccgcgcatcaactgctgcaaacgggaggagcgactgcaggggtaaaccggcggcgtgcgggtgatgtcatccggctgtgcgccgctatcctcttcaaacttcgccagcccctgacgcgccagcaggctgaaaacgtgcgggctcggctgctgttcgctgtcggcggtggtcagcgtcggcgcttcgccgtttgccagcagggtaaaatcgagcaggcgatgggtgtagtcgtaggttgggccaagcagctggccgccgggaatgtctttataaacggcggagatacggcgttcgagacgcatcccggtggtgtcgagcggctcgcttaccgccagcttcgccaacgtggtgcggtaggcgcgcagcaggaaaatcgcttcaacgttatcgccgctggcctgtttcagcgccagcgccgccagttcgcggtcggcaatgccgccttcggtcatcacgcgatctaccgcgaggttaagctgctgttcaatctgggcgacgctcagttcgggcaaatcggtatcgcctcggcgtcggctctcttgcagggcgtgggcggcgtcgatcgccttctcgccccctttcacggcaacgtacatcagcacacctccacatgagtggttcgcggaatagccagcaggcgctcgccacaggtcaggatcaggtcgatgccgagcgggaacggatgcgggcgctcggtgagttcgtgcagaatgcactccggcagctgcggagcgatcattcgttcttcggcaatacccgcaccagtaaggcgcaacatgcgtccgccgctcaggctggcgacctgtaaaatcagcgtcgcacccgcttccggcgcaacggcggtgccggtggaaagggcgttgagctgttcgctggaaatcgcctcatccgtcaccgcgaaggtcgcctgttccggctggctgaccagcggcgcgttggtatgaaaacgcaggctctggttgacgatatcgttatttaatggggtagaaagccacaccggcgtgtcgttatcggccagcgtcagcagcacgctggtggtggcgatattcagcggttgccagccgcgtttgagctgatgcagggcgacaatcacgcccggctcgctcatggcctttaacaggcgacgaaaactgtgctgggcatcctgcacgggaagcataaaagcggtttccagggtcatgcgttgtctccgcgaaccatcgtaaagaagtcgacccggctggcgttcacttcggcctggcgtgcggcaatgcgtgccatacggtcagcgtccagcggggcaataagggtttcacttaagttttgaaagtggcgagattgctgcatcagcgcgtcaatcagcgcgcagcgttcggcgtgctgtttatcacgcccctgcacccagctgtagccgagcgtgccgtcagtcaggcgcacggcggcgcgggtcagcgtggcgtcgccggcaaaaaaacgttcgccggtgccgcccatccgcgcctgaatctgtaccaggccagtttcagcggcgcggatcacctcatagtcggcggtgatgtttagcgcgttcaggcgtgctgccagttcagccggttggctgtgcgccagcacggacatccagtgctggcgggtcgcggtatctgcgtgcattcagtgctccatagtgaattcaatcatgtcggcgcgcgtcaggctgacggagtactccgccgggctgctttcaccgtcacggtggttaagggtgcgcacgcacagcagcgggctcatattcgggatttcaagacgctggcactctttggcctgggcgcggcgggcgctgatccgcgtctggctgcggcgcagcgcaattccggtttgctcgcgcagaaaatcgtgcaggctgccgctgtcgaagcgttgcagcgtcggccagagggtgaggtccgcgaagtagtggtcgattaaacagagcgcgacgccgttgacacgacgcagggtgcgcaggtggatgacgttctccccctcggtaatccccagtgcgtcagcgacgtggccggacgcggggcgcaatacgctaagcagtttttcgctggtgggatggctgccctgatccagcagattctggctaaaacgcgcctgggcgttgagcgggtaatcgaacgggcgcatcagcaccagcacgccgacgccctgacggcgctgtacccagcctttttccaccagttggtcgatggcgcggcgcagggtgtggcgattcacctcaaagcgcgctgccagttgctgctcggcgggaagatagtcgccgcagcggtagtgttgacgaagctcctgctcaagttttgcggctatctcttgatagcgtgttgggtagctggtcggatgtgtagacaagtgcatagatatcaatgcctcgcttatcagataaagtgcttacgcaaccgttgagagaggaaatccagcaggctgaccgtgacgatgataagcaccatcagggcgcaggtttgttggaactggaaaccgcgaatcgcttcccacagggtgacgccgatcccgcctgcgccgaccatgccgacgacggtcgccgagcggacgttggattcgaagcgatagagggagtaggagatcagcagtggcatcacctgtggcagcacgccgtagaggatctcttcgagcttgttggcaccggtggcgcgaatgccttccaccgggccgggctcaatcgcttccaccgcttcggaaagcagcttggagagcacgccggtggtgtggataaacagcgccagcacgccagcacgccagcgaacgggccgaggccgacggcgaccacgaacagcatggcgaagaccatttcgttaatggcgcggcaggcgtccatcaggcggcgaacgggctggtaaacccaccacggcaccaggttttcggcgctcatcaggccaaaggggatggagagaaccaccgccagcgcggtgccccagacggcgatttgcagcgtgacggccatttcggtgaggtaatcctgccactggctgaaatcgggcgggaagaagtcggcggcgaacgtcgccatgttgccgccgtctttgatcagcgtaagcggggccatttccgcgccctgccacgagacgaccaacacggcgagtacaacggcccagctcagaagcgagaaccagctgcgcttgggtggggcgatggtgatggtttgcatgtttggctccggtctgtaggccggataaggtgcttgcaccgcatccggcatcaacgcctgcacattgtcggatgcgacgccggggcgtcttatccgacctacgatttactgcaccgctttactcacgctactcatcgcgcttagcgcgttgttcaggcggtccaggtcatccagctgcgcctgaatctcggtggtttttgccagcttgtcctgctcattcagtcctttattgcttttcacgccctgcatctctttaaacagcgcgagctggcgaatcggcaccagttgcaggtcgctggaagcgcggaatggcgcccagcccaggcgttccagcaccgctttttcttccggcgttttgccgtagttcataaagaagtcgtagatcttgtctttggtggtttcggaaagattcttgcgccagacgatcggatcgcctgggatcagcgggctcttccagatcaccttcagttctttcagcttctctggcgcggaggttttcagcttgtcgaggttttcggtgttgttggtggcaacatccacctgcttgttggcgacggccagcgcgttggtttcatgcccggcgttgacggtgcgcttgaagtcgctggcggagatattgtttttggcgaagacgtagtagccggggacgaggaagccagaggtggagttaggatcgccattgccaaaggtgagatctttccgcttcgccagcagatcgttcaggttgttgatcggactgtctttgttgacgatcaacacgctccagtaacccgggcttccatccgccgcgaccgtctgggcgaagacctggccattggcgcgatccaccgcttccatcgcgctcagattgccgtaccaggcgatatccactttattgaagcgcatcccctggataatgcccgcgtagtccggggcaaagaaggcgttgaccttcacgcccagcttcttctccatatcctgcaagaacggcgtccattgcggtttcaggttttgctgactttccgtactaataatgccgaaattcaacgccttttcctgctcttcggcgtgcgccgggcttaacagggtgctgaggctgaacatgctggtgaaggccaggctggcaattatcttagcgttcattcgttttcctcaatgatggggatgtcaggcagctttcgcgttctcttcgacgcggttaatgctgcggtagagatggtcaaaacgttcgttatcaaactgttggctgctgccgtcgtagaagacgtgcccctggcgcagggcgacgatgcgttcgcagtagcgcagggcgtaatccacctgatgcagcgtgacgaccacggtgatgccgtcgttctggttgatgtcgcgcagggtgtccatcacgatgcgcgcactttctgggtccaggctggcgatgggttcatcggccagaatcactttcgcctgctgcatcagcgcacgggcaatcgccacacgttgctgctggccgccggagagggtggaaacgcgctgatgggcaaaatgcaccatgccaacgcgggtcagcgcctgtaacgcgcgctgtttctgctcgccggtgaaccagctaaaacaggtgcgccagaacggcgtgctgccgagcgcgccaatcagcacgttctccagtacgctcaggcggttcaccaggttgaattgttggaatatgtagccggtatgggcgcggcttttgcggatatcgcgggccaggcggccttcgcgctggactgtgcggcccagcagctcgatatggctaccgacagatttatcgccggtaatcaaaccgcttaagtgacgtaaaagggtggattttccggaaccgctcggcccaagcagagccaccatttcaccgtgatgaatgttcagatcaaccgcatgcagcgcctgatgctgattgaaggttttggcgagcttctcgacacggataatcgtttgcatgatgcagcctccctaaaaaagtggctccatcgtggcggattattgtgacgatttggttaattaaaagtgactaacagatgaagagttaacgggaattcgatgacagtgcgggagggcgggcctcccggcgggttattgcgttggttgttgtttgacgacattaatcatccacggtacgccaaatttatcggtgactttgccaaagccatgcgcccagaaagtttcctgccaggccatttcgatttttccgttagcggcaagattgtcaaaccagcgttttccttcttcgacctgttggctatcgagcaccagcgtaaagccggagtagctggcttttccactcggcatggcatcgctcatcatgatgtcgcttccggcaatgcgcacattggcgtgggcgatggcggtatcgggaaattgcattccggaagggcagttctcggcgctgtcctgcgcactttttggcatttcgccgaagctgattttatagagcagttccgcgcccaacgtacgttgataataggcaatcgcgtcggaacagttaccggcaaaagagaggtagggacttaacggcatgatggtgacctcagttaagagaagccagttaagtgtagttcgaaatttatacagatgagaggcggcctgataagacgcgcgagcgtcgcatcaggcagtcggcactgttgccggatgcggcgtaaacgccttatccggcctacggagggtgcgggaatttgtaggcctgataagacgcgcaagcgtcgcatcaggcagtcggcaccattgccggatgcggcgtaaacgccttatccggcctacggagggtgcgggaatttgtaggcctgataagacgcgcaagcgtcgcatcaggcagtcggcaccgttgccggatgcggcgtaaacgccttatccggcctacggatggtgcgggaatttgtaggcctgataagacgcgcaagcgtcgcatcaggcagttggcactgttgccggatgcggcgtaaacgccttatccggcctacggagggtgcgggaatttgtaggcctgataagacgcgcaagcgtcgcatcaggcagtcggcaccgttgccggatgcggcgtaaacgccttatccggcctacggagggtgcgggaatttgtaggcctgataagacgcgcaagcgtcgcatcaggcatctggcaccgttgccggatgcggcgcgagcgccttatccggcttaccgatcacaatacaatcagttctttttcacaaactcagatttcagtttcatcggaccaaaaccgtcgattttgcaatcgatgttatggtcgccttcaaccaggcggatgtttttcactttggtgccaattttcagcatgctagagctacctttcaccttcagatctttaatgatggtaacgctgtcgccgtcagccagcagattgccgttagcatctttaacgatcagctcgtcgctttcctgtgcaggttctgcgtcgttccattcgtaggcacattccgggcagatgtacatgccgttatcttcgtaggtgtattcggagttgcattttgggcagtgtggtaaactcatgtggatttcctcaaaagtcagcagggcaaaagcgccaaaaaacggcagattgccgaaaaaggccgcaattatacacaaaatccctgagtttgtcgggggtactgctgattttagacgacgatcgttttcatttgaaaggaaacgcaaaaagaaaataatctttttgcctctatttattatttaagataatgttaatgctctacttgttctttttttaattcacatgatatttttatctttctgacgttttaaacgtatcagaagacgttatttattctgataaaaaacaacacactaaatataaaattatttcttgcagtaattataaaagccgaaaacagaactcaaaaacaatctggctaaataaaataacaaaatttgctttaaggaagaattttctatgtacacacagaccctgtatgagttaagtcaggaggctgaacgcctgttacagctttctcgccaacagttgcagttactggaaaaaatgcctctctctgtacccggagacgacgcgccacaactggctttaccctggagtcagcctaatatcgccgaacgtcacgcgatgctgaataatgagttgcgtaaaatttcccgactggaaatggtgcttgcaattgtcggtaccatgaaagcagggaaaagtaccaccattaatgccattgttggtacggaggttctgcctaatcgtaatcgcccaatgactgcgctgccgacgcttattcgccatacgcccgggcaaaaggaaccggtactgcattttagtcatgtcgcgccaatcgattgtttaattcaacaattacaacagcgcctgcgtgattgcgatattaagcatctgaccgatgtgctggaaatagataaagatatgcgtgcgcttatgcagcggatcgaaaatggcgtcgctttcgaaaaatattatctgggtgcccagcctatttttcattgtctgaaaagtttgaatgatttagtgcgactggcgaaggcgctggacgtcgattttcctttttctgcttacgccgccattgagcatattcccgtgattgaagtggagtttgtccatctagcggggctggagagttatcccggtcagttgacgttactggatacccccgggccaaatgaagccgggcaaccgcatctgcaaaaaatgcttaaccagcagctggcacgcgccagcgcggtactggcggtgctggattatacgcaactgaaaagcatctccgatgaagaggtccgtgaggcgattttggcggtggggcaaagcgtgccgctgtacgtgctggtcaataagttcgatcaacaggatcgtaacagtgacgacgccgaccaggtgcgggcactgatttccgggacgctgatgaaaggctgtattacgccacagcagatatttccggtgagcagcatgtggggctacctggcgaatcgggcgcgctatgagttagccaacaacggtaagttaccaccgccagagcaacaacgctgggtggaagattttgcccatgccgcgcttggcaggcgctggcgtcatgccgatctggcggacctcgaacatattcgtcatgctgccgatcagttgtgggaagatagcctgttcgcccagccaattcaggcgttgcttcatgccgcttacgctaacgccagcttgtatgctctgcgatctgccgcgcataaactgttgaattacgcgcagcaggcgcgggaatacctggattttcgtgcgcacgggttaaacgtcgcttgtgaacaattgcggcaaaatatccaccagatcgaagaaagtttgcagctattgcaactcaatcaggcgcaggtgagcggcgagattaaacatgaaatcgagctggccctgacctccgccaaccactttctgcgtcaacagcaagatgcgctgaaggtgcagttagccgccttgtttcaggatgatagcgagccgttaagcgagattcgtacccgctgtgagacactgttacagacggcgcagaacaccatcagtcgcgactttacgctgcgttttgccgagcttgaatccaccctttgccgggtgttaaccgatgttattcgccccattgagcaacaagtcaaaatggaattgagcgagagtgggtttcgtcctgggtttcattttcctgtttttcacggcgtagttccccacttcaacactcgccagctgttcagtgaagtcattagccgccaggaagcaacggacgagcagagcacgcgtttaggcgttgtgcgtgagacttttagccgctggttgaatcagcccgactggggacggggaaatgagaaaagtccgacagaaacggttgattacagtgtgttgcaacgagcattaagcgcagaagtcgatctctattgccaacaaatggctaaagttctggcagagcaggtcgatgaatctgttacggcaggcatgaatacttttttcgctgagttcgctagttgtttgacggaattacagacgcgtttacgcgaaagtctggctctgcgtcaacaaaatgaaagcgtggtcaggctgatgcagcagcaattgcagcagactgtgatgactcacggctggatttacaccgacgcccagctgttacgcgatgatattcaaacacttttcacggcagaacgatattgaccaagacgttacttgacggccccggtcgcgtgctggagagcgtttatccccgctttttagtggatctggcgcagggtgatgatgcccgccttccacaagcccatcagcagcagtttcgtgaacgactgatgcaggaacttcttagccgtgtgcagcttcagacatggacgaacggcggcatgttaaatgcgccgcttagcctgcgtctgacattggtggaaaaactggcgagcatgctggatcccggtcatctggcactgacgcagatcgcgcagcatctggcgctgctgcaaaaaatggatcaccgccagcactctgctttcccggagctcccccagcaaattgccgccttgtatgagtggtttagtgcccgttgtcgctggaaggaaaaggcgttaacgcaacgaggcctactggtgcaggcaggtgatcagagcgagcaaatttttacccgctggcgtgctggggcgtataacgcctggagcttgcctgggcgctgttttatcgttctggaggagttgcgctggggggcatttggcgatgcctgccgtctgggaagcccgcaagcggtggcgttgttgctgggtgatttgctcgagaaagcgacacaacatctggcagagagtatcaatgcggcaccgaccacgcgtcactattaccatcagtggtttgcctctagcaccgttccgacgggcggggagcatgctgattttttaagttggctgggaaagtggaccacggcagataaacaacccgtttgctggagtgtgacccaacgctggcaaactgtcgcgctggggatgccacgactctgtagtgcgcagcgtctggcgggggcaatgctcgaggaaatcttctctgtaaatttggcgtaaataatcagttacatcaatgagtcctaaacgaaatccatgtgtgaagttgatcacaaatttaaacactggtagggtaaaaaggtcattaactgcccaattcaggcgtcaactggtttgattgtacattccttaaccggagggtgtaagcaaacccgctacgcttgttacagagattgcatcctgcaattcccgctccccttttgcggccgtcgcgctgatttttctggcgtttgcggaaatgggccaactctgcgaggaaagctatgctgaaaaggaaaaaagtaaaaccgattacccttcgtgatgtcaccattattgatgacggtaaactgcgtaaagccattaccgcagcaagtctgggtaatgcaatggaatggttcgattttggtgtttatggttttgttgcttacgcattaggtaaagtttttttcccgggggctgaccccagcgtgcagatggttgctgcacttgccactttctccgttccctttctgattcgaccgcttggcggactcttctttggtatgttgggcgataaatatggtcgccagaagatcctcgctatcactattgtgattatgagcatcagtacgttctgtattggcttaataccgtcctacgacacgattggtatttgggcaccgattctgctgttgatctgtaagatggcacaaggtttcagcgtcggcggtgaatataccggggcgagcatatttgttgcggaatactcccctgaccgtaaacgtggctttatgggcagctggctggacttcggttctattgccgggtttgtgctgggtgcgggcgtggtggtgttaattagcaccattgtcggcgaagcgaacttcctcgattggggctggcgtattccgttctttatcgctctgccgttagggattatcgggctttacctgcgccatgcgctggaagagactccggcgttccagcagcatgtcgataaactggaacagggcgaccgtgaaggtttgcaggatggcccgaaagtcagctttaaagagattgccactaaatactggcgcagcctgttgacatgtattggtctggtaattgccaccaacgtgacttactacatgttgctgacctatatgccgagttatttgagccataacctgcattactccgaagaccacggggtgctgattattatcgccattatgatcggtatgctgtttgtccagccggtgatgggcttgctgagtgaccgttttggccgtcgtccgtttgtgctacttggtagtgttgccctgtttgtgttggcgatcccggcgtttattctgattaacagtaacgtcatcggcctgatttttgccgggttactgatgctggcggtgatccttaactgctttacgggcgttatggcttctaccttgccagcgatgttcccgacgcatatccgttacagcgcgctggcggcggcatttaatattagcgtgctggttgccggtctgacgccaacgctggcggcctggctggtcgaaagcagccagaatctgatgatgcctgcctattacctgatggtagtggcggtggttggtttaatcaccggcgtaaccatgaaagagacggcaaatcgtccgttgaaaggtgcgacaccggcggcgagtgatatacaggaagcgaaggaaattctcgtcgagcattacgataatatcgagcagaaaatcgatgatattgaccacgagattgccgatttgcaggcgaaacgtacccgcctggtgcagcaacatccgcgaattgatgaataagctgaaacggatggcctgatgtgacgctgtcttatcaggccaattgaactcttaaggttcacttaatctctgacgcgcatactctcctccaggttaacggaggagagtgcaatgaaaaaccgtgtttatgaaagtttaactaccgtgttcagcgtgctggtggtcagcagctttctttatatctggtttgccacgtactgatctttcttcagccgtacccaggcccgcgtgccggaagtctcttgccggttttgcaggaaaaactgcccgtgatgcaactgtgtaatgcggctgacaatacttaaccccagaccaatcccgccataacggctgtccatacgtacaaacgctttactcaactccccgcatttactctcatcaatacctggtccttcatcttcaactgccatgaccgctccgtcatcttcttgcagcttaatcataatgttgctgccttgcgggctgtaacgatgggcgttttctaccaggtttcgcaataacatccgcagcagggttgcatcaccctgaacggtgatgtcggcggcgctctctggcaatagcagggtttgctgtcgctggtcgagcatggtactgagttcgtcatagctggggagaatgacatcttccagcagttttacatgttgataattaccggaagaaaaactctgtccggcacgcgccagttgcagcagctgggagacgctctccatcatctgatcaagccgtgccactaacggtgctacatcaatgtgatgcgttttcgccagcagttccagatgcaaacgcacccccgccagtggcgttcgcagttcgtgcgcgacgtcagcggtaaacaacctttcgttatccagcgtgctggtcaggcgactgaccagatcgtttaacgcgctaaccaccgcttcgatttcgagggtggcgctgtgaatggcaatgggcgttaagttgtcggcggtgcgcgcttccagctctttttgcagctccgccagcgggcgggtgatgcggcgtaccgcctgatagcagataaatagcgtcaggctgaccataaagacgccggggacaatcaggctggcgaccgcctcgcggatctcacgcatgatgtggcgatcgttgttgcgattgtcgcgtagcgcctgctcaaacagctgaatctgctcggtactttcatgccatagccagaagacgctgatcagctcaaacaccaacaaaatggccccgatggtcaatatcagccgttggcgcaggcttattggtcggcgcagaaaatgcatcagattcaattagttttcctcattcgcgaccagcatatagccaaagccgcgcacggtgcggatacgggctttgcccactttgtcgcgcagattgtggatatgcacttccagggtgttggtgctgggttcattgtcccagttatagatgtcgttgtagagaatttcccgatgcaccggactgcctgctttgagcattaaccgactcagcagagcatattctttgggcgtcagaatcaactcttcaccgcccatccatacctgacggcgacccatgttcagcgtcagattgccaacaatcagctcactttcgccctgattattatggcgtcgtagcagggcgcggatacgggcatgtaactcttccagcgcaaaaggcttcaccagatagtcgtcggcaccgacatccagcccggcgattttgtcggtcagcgtatcgcgagcggtgaggatcagtaccggcagggtatattttttctgccggatacgggcgagaaaatgcagtccatcttcgtcgggtaaccctaaatccagtaccaccaggctgtaatgacctgcctcaaggctttgttccgccatccgcgcggttgtcacgctatcgcacgcgtagccttcggtttgcgccgccagaatcagtccctgcaataacagcgtatcgtcttcaacaatcagaattttcattcactcactctcctgcaagtttgcagaatatcatccgcagcctggtaatacttcgtctcaacgccagttaatcccaatagcgtggagaataaattgtcttgactatagtgttgcgtttgcgcctgtttttgcaggcagttctggtcaacctgataccgtttttgataatcctcgctcagccacagcagcatcggcacctgtttttggctatccggggcgatggcataaggcagaccgtgcagatagatgccattttcacctaagctttcaccgtggtcagaaagataaaccaggctggtggtaaatttatcctgatgttctttcagcagattaatcgctttatcaacaatatagtcgacgtaaaccagcgtgttgtcgtaagtgttcaccagttgctctttggtacaggtctggatctcattggtgtcgcaggttggggtaaatttcctgaactgaggcggatagcggttgtaataggtcggaccgtggctgccgatggtgtgtaagacaatcacgccatcaccttgcaggttattgatgtactcttcaagcccgtggaacagcacttcgtcatagcattcgccgttgatgcactgatcaggtagattcagcgcggtgacgttctggtgaggcacgcggtcgcaggcacctttacagccgccatcgttgtcattccacagcacgttgatgcccgctcgctgaatgatatccagcacgccttcctggtgctgtgccagctcttctttgtagtgctcacgcggcatatcgctgaacatgcacggtacactaactgccgttgccgtgccgcaagatgcggtattagggaaatagaccacgttatctttcgccagccgcgggttagtttcacgcgggtagccgttgagggagaagttctccgcccggctggtttcgccgacaatcaggatggtcaaatttttacgtttttcgttctgcattaacgggttgcggtgcgcgtcttcaccaattcgcaccagcggcagatttgccagtcgctgatgggagtaccaactccagctggcaacaatgctgttagaggggcttaaggatttcaccagctctttgttattgcggaacaagctggcgtagtctttataaaacagtgcggcgaccagcaaaatcagtagtacagaaaccagaatattggctccacggaaaagaacactgcgcagacggctggtggcaggtttgatttttatccagcaggcaatcagcgcagcaagcacgccgctgaatcccagcgttaataacatttgcggtgtcatcagcgcataactttctgccggagtggtatcaataatattggcaatcatgctgcggtcgatgacgatgccgtaagtcattatgaaatattgtgcagccgcgccaaccagaataaacaggcaggccagtggtcgattaagccataagaaagagcttagtgtcaggacaatattaatcacgctgaaagcgacgaccggcatgctcaagaaaaccagtacgttatgcaggctatccagcggcagcgcctgcaacacctgtttaaaaaaggcaatattcaggcagatagagatataaaaagcggccaacaatagccaggcgagtaaattcaaagagggtctttttagtaggcgcttcaacatcacggtgtttccatcgaacaaagtgcgcatatgctcgcaaagcaaaattaagccaaccttaagttcttaaggttggcttttatgtttgctggattaaggggaattaatctttgcttattggtgcatctaagggatacgggtttttatgtagccggttgtaattcagcgcatacatggcggtgatgaccatcagggtgacaaaactccacataacctctttcgctccggaccccaccacggcccagatgcagtagaggaaggcaatggtagtaactgccagatatgccgggcgtgctttaccaaagtgaccgtgtccgagcagcagtaacgccgcacaggtgtaaagatatggcaccagtgtaaagatgacgctgacggaagaaaccagaccgaactctttggtcgcgtttggactaatgctgctgagctggaagatggtcatcaaaataccgacgataatcagccccgccactggcgtacccgctttatttacacgggcaaaaatcggtgggaacagtccgtcatcggcagcggctttcgccgtttgacccgccagcaacgtccagccgcccagactacctaagcaacccgcagctgcgcagaaggaaacaatggccccggcggtgtcacccaacgccatccgtgcggcatcaccgaatgggctagcagaaacgcgcagtgcggcattagggatcatccccataatcgcggtggtagaaagtacatagcaaacggcggcaatcaataccccaccaatggtggcgatagggacattgcgtttcgggtttttcaccacacctgcggcaacggaggcactttccacaccgatgaagctccacagcgtaacgttaagggtactttgaattgcaccgaaggtgcccaggccgctgacgttccatgccgccatataggtttcaccacggaaccagaaccagccaaatacggcaatcccgacgatggggatcagcgccagcacggtggcaactgcctgcacacgggtgatcattttcggaccgacaatgttcagcaggacgaagatccacagcaccacgacgcaggtgatggttaataccaatggatctttcagaatcgggaagaagtaacttaaatatcctacgccaatgaccaccatggcgatattgccgatccagcaggccagccagtagaggacgttggtttgataaccgagaaacgggccaaagcagcggcgggcgtaagcgtaagaaccaccaggacttgggtcgaggaagctcattttggcgtataccatgctgagccccagtgcaccgataatcgtcaccaaccatccataaatggcaatcccgccagtagaggccaggtttgcaggtaacagaaaaacaccactccccataatattcccgctcaccatcagggtgacggggattaagcccactttgtgagcatcagcatcgctagacataattaaactcctgcgaaggcgagcttcgtgacaataaattacgtcatatcatacgcctgcattcgatagttgaattattatcgaccgggttatcgctgatgccgttattaatatagctcttcgttaaggttaaaaatcaggcgacagtgcgttctctgtgctgactaacataatgcagcggcgtcataccgtagaagtctttaaagacagaaataaagtagctcgtactgttgtagccgcaggactgacttacctgagagatatttttaccgtccatcattaattcatttacggcataacgcatgcggcaggtggtgattatttggctataactggtgttttcgcttttcaactttttctttaacagacttgggctaagacataaacaactggctaccatactaagattccagtctttgtgaatatcgctttcaataatttgataaacgctgtcacttacacaattacgtaacatatacatcattaaactaacgaattttttactgtcgagaaaacgggatagcaccgtgaataataatgcgcgtgttcgttccttttcactctcagtttctgcgggcatcatgctgtgttgcgcggcaacgcgaaagacgtctggcgtcaggcatggcagggtgagtatgggcgtagcgctacgttgccatactggtatttggctgagatctttattcagaaaccggaggtaatctttgatgatgtcgtgactaatatgagcaaccaaagtgttgttaagagaggagacgtcgataatattattttcacaatttaataacgccatatggttagctttaaggctaataggttctttcccattcacccttatccagacatctttttcagtcaataaaacaatacaaggttggtcgctgcaaatcctcatacatgtactcctgagtgcgaataaaagaccagttctcgctaaagcaaagcgataccgggaaatggttatataattgtatgatgaatataaacatgcataaaaataacgagttttactaatagtacaaatttttatagtaatttctcatgtacatatttttttacaggataaataacaggcaaaaaaaagcgcggggtggggccgcgcaaaaagtatgacatttttgtttgcagcaatttttatgaaaacgttgccatactcaaaaggcctaaggccaggcggcgtaatgttatttaaacaattacgccttcagcggaatagtggttacgctttcacgcacataacgtggtaaataccgtcaataatttcagtcccttcagtttcgtgttcaaatccagggaaatggtggtcccaggattgcaggctgcgtaaataacttacttgcggactgtttttatcgccgaagttttcaccagacagcagcatcgggattcctggcggatacgggataacactgtttgccgcgatgcgtcctggcagattttcaatggataccagttcgacattgttgtcgacaatcgcgttgtacgcttcacgcggggtgacttccgccaccggcaggccggaataggcttcgttcaaccgtgcgccagggttgttttctttcagccaggcaaacatggtgtcacccagatcgtgaatccccatgttcgcgtaagtgtcaggatattgttcaacaagttccggcatcacctgcgccagcggtgtgttggcgtcatagtggcgtttgaaggagcaaagggtgttaaccagagttccccatttcccacgggttacgcccatagagaacaggaacataatttggaagtcagtggtgcgggtaggtacaatgccgtggcgaccaagccaggcagtgaccagcgccgccggaacaccggtttcttccagttcaccatcttcacccattcccggagcaaggatgctgactttaatcgggtcgagcatactccagttatccggaatatctttgaagccgtgccagctttcgcccggatgcattacccagcagtcctgaacggtggtcagcagtttggttggtgcgtcagcaaagtcataggttttgccggtttgtgggtcggtgacgacttctttgttccacggtttgaagaaccagctaccgtcagcggtgaactctttatatagccgcgccatcgcctgacggaaatcaaccgcttcgtcaatcacttcctgtgtcagactcaggccgctgttgccgtccatcatgctcaccgccacgtcgttggatgcgcagatggcatacagcggggaggtggtggcatgcatcatgtaggcctggttgaagcgggagaagttaatcgccccacgaccttcacgtacatgaatataagaagcctgactcagcgcattcagcagtttgtgggtggagtgggtggcgaaaacggtaggaccgttgtgatcgccaggttcgccgcgcatggcatagtgatcggcatagatcgggttgaaacgtgcatagccgtaccaggcttcgtcaaagtgcagacgatcggaggttttttccagcagatcctgcgcttctttagcgttataacacacgccgtcataggtgcagttggtcaccacgcagtaagacggtttttgcccggctttgtctttggtcagcgggctttcactgattttcttctgcaaggtttcaggttgcatttcctgcggatagattggcccgataatgccgtagcggttgcggcttggcaccatatagaccggtttcgcgcctgtcagcatcaaaccttgttcgatggatttatggcagttacggtcaacgaccacgacatcgttatcggtcatgcaagcctgcatgatggtgcggttagagccggaagtaccgacgactacgctccaggagcgatcggcaccaaatacgcgtgcggcatatttttcgctttcgccaaatgcgccagtatggtcaagcaaagaaccgagggaagttcgttcgatgcccatgtcggtgcggaacagattttcaccatagtagtcatggtagaaacgtccggcgggtgttttggtaaaaccaacgccgccctggtggcctggcgctgcccaggaatattcatggatgtcactatatttcatcagcgcgctgaacagtggcggcaacagctgctggcggtagcgggtcatcgcggcaacggcgcgtccggcgataaagtcggcggtatcttccagaatccaggcgaattcatcgacaagctccagcaggtcgcgatccattgcggcgagggctttttcccgatcgcccaacaggaagaccggcacgttttgttggcgctcatgaagcttaccgatcaattgtctgacgttttgatgttcgtccggatgttccatttgatagctgaacatcaggcagtcaatggcttcgttactagagagaatggcaaaaccatcatcaaaggaggtggatttaatcacggtaacattttgctggcttaaagcatctgccagacgctcaacggcgttaccgacccaggtgtcttgatggagaaactcgctttcaacaattaatactttcatcattgcttacccggttatgaaggaatcttcgttgcgggcaagtatcttccggccttttcgggctgtaaagcgcgtgaaaaacaaacatttttgaaatatttagttttataaacaatacgttatgtgattattttaaattattttcactgcttattatcgacggctaaactatttttttggctgatactgatatcgtctttagccgggaaacgtctggcggcgctgttggctaagtttgcggtattgttgcgggctcatgccgacatatttgccgaacgtgctgtaaaaacgactactactacgaaagcctgccgtcagggcaatatcgagaatacttttatcggtatcgctcagtaacgcgcgaacgtggttgatgcgcatcgcggtaatgtactgtttcatcgtcaattgcatgacccgctggaatatccccattgcatagttggcgttaagtttgacgtgctcagccacatcgttgatggtcagcgcctgatcatagttttcggcaataaagcccagcatctggctaacataaaattgcgcatggcggctgacgctgtttttgtgtgtgcggctggttttattgaccagaatcggttcccagccagagaggctaaatcgcttgagcatcaggccaatttcatcaatggcgagctggcgaatttgctcgttcggactgtttaattcctgctgccagcggcgcacttcaaacgggctaagttgctgtgtggccagacttttgatcaccatgccgtgagtgacgtggttaatcaggtctttatccagcggccaggagagaaacagatgcatcggcagattaaaaatcgccatgctctgacaggttccggtatctgttagttggtgcggtgtacaggcccagaacagcgtgatatgaccctgattgatattcactttttcattgttgatcaggtattccacatcgccatcgaaaggcacattcacttcgacctgaccatgccagtggctggtgggcatgatatgcggtgcgcgaaactcaatctccatccgctggtattcgctatacaggctcagcgggctgcgggtctgtttttcgtcgctgctgcacataaacgtatctgtattcatggatggctctctttcctggaatatcagaattatggcaggagtgagggaggatgactgcgagtgggagcacggttttcaccctcttcccagaggggcgaggggactctccgagtatcatgaggccgaaaactctgcttttcaggtaatttattcccataaactcagatttactgctgcttcacgcaggatctgagtttatgggaatgctcaacctggaagccggaggttttctgcagattcgcctgccatgatgaagttattcaagcaagccaggagatctgcatgatgtctgcacccaaaattacatttatcggcgctggtagcacgattttcgttaaaaatattcttggtgatgtgttccatcgcgaggcgctgaaaacggcgcatattgccctgatggacattgaccccacccgcctggaagagagccatattgtggtgcgtaagctgatggatagtgcaggggccagcggcaaaatcacctgccacacccaacagaaagaagccttagaggatgccgattttgtcgtggtggcatttcagattggcggttatgaaccttgcacggtgactgatttcgaggtctgtaagcggcatggtctggaacaaaccattgccgatacgttggggccgggcggtattatgcgcgcgctacgtaccattccgcatctgtggcaaatttgcgaggacatgacggaagtctgccccgatgccaccatgctcaactatgttaacccaatggcgatgaatacctgggcgatgtatgcccgctatccgcatatcaaacaggtcgggctgtgccatagcgtgcagggaacggcggaagagttggcgcgtgacctcaatatcgacccagctacgctgcgttaccgttgcgcaggtatcaaccatatggcgttttacctggagctggagcgcaaaaccgccgacggcagttatgtgaatctctacccggaactgctggcggcttatgaagcagggcaggcaccgaagccgaatattcatggcaatactcgctgccagaatattgtgcgctacgaaatgttcaaaaagctgggctatttcgtcacggaaagcagtgaacattttgctgagtacacaccgtggtttattaagccaggtcgtgaggatttgattgagcgttataaagtaccgctggatgagtacccgaaacgctgcgtcgagcagctggcgaactggcataaagagctggaggagtataaaaaagcctcccggattgatattaaaccgagtcgggaatatgccagcacaatcatgaacgctatctggactggcgagccgagtgtgatttacggcaacgtccgtaacgatggtttgattgataacctgccacaaggatgttgcgtggaagtagcctgtctggttgatgctaatggcattcagccgaccaaagtcggtacgctacctagccatctggccgccctgatgcaaaccaacatcaacgtacagacgctgctgaccgaagctattcttacggaaaatcgcgaccgtgtttaccacgccgcgatgatggacccgcatactgccgccgtgctgggcattgacgaaatatatgctcttgttgacgacctgattgccgcccacggcgactggctgccaggctggttgcaccgttaaaacgcgactaaacgctactgcgccgggggatttattccggcgcacacctctgacgataccaataacagaaggcgggcgttggtaacagcgacccgataccctatgagcatttcaatgactacaaaactcagttatggatttggagcgttcgggaaggattttgcgatcggcattgtgtatatgtacctcatgtattactacaccgatgtcgtcgggctgtctgtgggtttggtcggtactttgtttctggtggcgaggatctgggatgctattaacgatccgattatgggatggattgtaaatgctacgcgaagccgatggggtaagttcaaaccctggatcctgatcggtacgttggcaaactctgtaatcttatttctcctctttagtgcgcatctgtttgaaggtactactcagattgtctttgtttgcgtgacctacatcctctggggcatgacttacaccattatggatattcccttctggagcctggttccaaccatcacgctcgataaacgtgagcgcgaacaactggttccttatccgcgtttttttgccagtctggcaggctttgttacggcaggtgtgacgctaccatttgttaattatgtcggcggtggcgatcggggatttggctttcagatgttcactctggtactgatcgccttttttattgttagtaccatcatcactctgcgcaatgtgcatgaagtctttagcagtgacaatcaaccgtctgctgaaggaagccatctgacacttaaagccatcgttgcgctaatttataaaaacgatcagcttagttgcctcttgggtatggctcttgcttataatgtagccagcaacattattaccggctttgctatctattatttcagttatgttatcggtgatgcggatttgttcccctattatctgagctatgcgggagctgctaacctggtgacgttagtattcttcccacgcttagttaaaagtttatcccgacgcattttatgggccggagcatctattcttccggtgttaagctgtggtgttctcctgttaatggcattaatgagctatcacaacgtcgtcctcattgtgattgcgggtattttgctgaatgtgggaacggcgcttttctgggtattacaggtcatcatggtggcagatatcgttgattacggtgaatataaactgcacgtacgctgtgaaagtatcgcttactccgtgcagactatggtggtgaagggcggtagtgcctttgcggcttttttcattgcggttgtgttagggatgattggctatgtaccgaatgttgaacagtctacgcaagccctattaggtatgcagtttattatgattgctctaccaactctgtttttcatggtaacgctgattctctacttccgtttctatcgcctcaatggtgacacgctgcgcaggatccagatccatctgctggataaatatcgcaaagtaccgcccgagcctgttcatgctgatattccggtcggtgcagtgagtgatgtgaaagcctgacgtggacaatagctaacgaaaatggcctgatgcgatatgtttatcaggccacgtcttaatgtaatgctttggatttgcaaattttgtagaccggataaggaattcacgccgcatccggcatcaacaaagcgcaagttgttatccggttatcaagccaaagcgccgtagctggcggcaatgaaagcgagcgaggaatatcaccgtcgttaatgcgccaagcagcgcgcagaacatatcggattgcgtgtcccactggtcgccctgggtgccgagaaaatcatccgctccctgacccattgccagcgctgcccaccactcgattaattcatacatcgcgcttatcgccagcgccacgcagcagaccaggaacgccaccattttacgtccgcgcacgtacatcccgcgaacgagaatttctcgtgccaccagtgcaggcaccagcccctggaaaaagtgccccagcttgtcatacggattacgactcaaccccagccattcctgcacctcaaaaccaacggggactttcgcgtaggtgtattgtccgccgaccatcaggatgatggcgtgaaggaaaatgagcgtatagagcagcggcgttaacggataacgtctggcggtggcaagcagtagctgcacgacaataatcaccggtgtcacttccatcagccaggtgagtttgtcatgggcgctaatgccggtataaatcaggattaacgttagcgtcagtgcgctggtgttaagaattaacggcttgagtgtgcgggtcatggtgagttcgcaaatcagggaaaatactgactattcaccagcaagcgtgaaattacaatcgcaaaagaggtggccagggggatcacctggcagcatgctgccaggcgctgggccgaagaggttacttagtgcagttcgcgcactgtttgttgacgatttgctggaagaagtcgttacctttgtcatcgaccaggataaacgccgggaaatcttctacttcgattttccagatagcttccatacccagctccggataagcgacgcactccagatgcttgatgctctgctgcgccagtaccgccgccggaccgccgatgctaccgaggtagaagccgccgtgtttatgacacgcgtcggtaacctgctgactgcggttacctttcgccagcatgatcatgctgccgccgtgggattgcagcagatccacgtaggagtccatacggcctgcggtggttgggccaagactaccacttggataaccggcaggggttttcgccggacccgcgtagtagatcgggtgatctttgatgtactgcggaagttctttaccggcgtcaatcagctctttcagcttggcgtgtgcaatatctcggcccacgataatggtgccggtgaggctcaaacgagtggataccgggtattggctaagctgggcgaggatctctttcatcgggcggttaaggtcaactttcaccgcttcgccttcaccggcctggcgcagttcttgtggaatgtactggcctgggttgtgttccagtttttcgatccagataccttcgcggttgattttcgctttaatgttacggtcagcggagcaggagacgcccatgccgaccgggcaggatgcgccgtgacgtggcagacggataacgcgaatgtcgtgcgcgaagtatttaccgccaaactgcgcgccaagaccgagtttctgggcctcttccagcagttcctgttccagctggacatcgcggaacgcctgaccatgttcgttcccttccgtcggcagttcatcgtaatagtgagcgcttgctaacttgacggttttcaggttggtttccgcagacgtaccgccaatcacaaacgcgatatggtacggcgggcaggctgcagtaccgagggtacgcattttctcgacgaggaagtttttcagtttgccgggagtcagcagggctttggtttcctggtagagatacgttttgttggcagagccgccgcctttcgcaacgcaaaggaatttgtactcatcgccatctaccgcgtacaggtcgatttgcgcaggcaggttagtgccggtgttgacctctttgtacatgtccagcgccgcattctgactatagcgcaggttatcttcgatataggtgttatagacgcctttgctcagcgtttcttcatcaccgccgccggtccacacgcgctggccttttttaccgacgatgatcgcggtgccggtatcctggcaggtcggcagcacgcctttggcggcgatttcggagtttcttaagaattgcagcgccacgtacttgtcgttttcgctggcttctggatcgtgaagaatagccgcaacctgtttctggtgtgccgggcggagcataaaagaagcgtcgtgaaaggcttgctgcgccagcagggtcagggcttctggttccactttcaggatggtttcgccgtcgaagtcggcaacgctaacgtaatcggaagtgagtagatagtattcggtattgtctttccccatcgggaaaggtgcctggtagataaagggtttgttactcatagcttccagcctgtaactctgtatttgttattcgaaaatggcgtgccgcgtagtcacgggcggcacgcaaagtgcatttataagaacccgtacatcgcggcgaagatccagccgaagacgcagcttacgctcacaccaatcaaccccggcagaataaagctgtggttgatgacgaagcgaccgatgtgggtggtgccggaacggtcaaactgaatcgctgccagatcgctcggataagtcggcaggatgtaataaccgtagcaagccggtgcactagccacgatgtatgccggatcaacgccgatcgccagcgcgaccggaacaatcgccgccagcgccgcagcctgagagtttacaaacttggaaaccagcagcagaacaatggcataggcccacggatactctttcaccatttcacccagtacgccctgaatttcagacatatgcgcaccgaacatggtttctgccatccatgcgataccgtacaccgccacgatggcgatcataccggaacggaagacttcgtttttactgatagacgcgggattggttttggtcaggataataatcagcgccccggtcagcagcataaacatctgaataaccagtaccatgctcagcggtttgccgccgaaggatggacgcaggtcgctatcagcaccaagaagggcgactacagcgattgccccgaggaaaatccacattgccagccagttgcttttcggcagttttttatccagcagcgtcgcggtatcaccgtaaacatactcacggttttccggtacggagatgaatttctggaactcttcgtctttatccagatctttaccgcggaaccagctgaagataccgatcgccaggataccgattaacgtgcttggaatggtgattgccagcagatcgaggaactcaagatggcgaccatcaaaggtgacattacccagcatcgcaaccagagacacgaccgcaacgctcaccggactggcgataatccccatctgtgcaccgatagaacttgccgccatcggacgttccggacggatgttgttcttaatggcgacgtcgtagatgatcggcagaatggtgtaaaccacatgacccgtaccgcaaagaatggtcagtgtacaggtcacaaacggcgcgacaatactgacatatttcgggttgcggcgcagcagcttctcggcaatttgcagcatgacatcaagaccgccgctagcttgcaaggtcgcgcttgccgccaccaccgcaatgataaccagcatgacatcaactggtggtttacctggctgaaggtggaagacgaagaccagaatgaccagaccgataccgcctaataaacccagcgcgataccaccctttctggcaccataaaacagacatatcagtattatgataagttggatagtaaataacatgtgtgaaccctcgcgataatcctatttaaatttttgctgaatagatcacagtcacgttctgttttgtatgaactgttttcagagcctgactaaatatccgtttggtcgttaccggctttagcaaatacctcacagtgaatattggctgattaaagcagcggcaaatttatgcactgtgataagcggctttttcagagagaaagactctctggcgatgggtttatagtttgtactgcgcagatgttaatgttttgtttgctgttatcttattgatatttatcggtctattttttgttctcagggcagatgtcattaggtttatagattaatctgatctacccatttgtgggtaaaaatacacataatgcgggtgacataatagttaattaacttttgttagcgttttgaaattaaaaacaccgttcacctgaagagatattaatttttagcgatgatggagggataattatatttgatctggcacaagttttactgatgaaggatgtaacttgtgccaggggtattttgcattacggtaataattattacttacagataaccagcgatccgttattggcaatattgtttcagtagactgtagtgttctgcctgaatacggtaacggtaaactggacgccccgtgacgccataatggatactggtgaacaagatgtggcagttgaccagccagatgaggtatttacggcaggaaacacggctaatgttaacctcgttggctagctcgtcggtactaaattcatagtcctgatgcgcgtcaatccactggcacagtgtgcgtaacgtctgcggcgttaagccttttggcaagcgacgaggatcctgttcgttggagctgctgccgtggattagctgatcaagctcggcctggtcataatactgatgtttttccagcgccattttcttttgccgccagccggtgagcgcctcttcaaagcgggaagcctggaagggtttgatcaggtaatccacgacaccgtaatgcaggctatctttaatggttgccgcatcggctgcggaggagatgacaatcacatcacttttgcaacgcgcgttatgcaggacaggcagtaaatcgagcccgttctctttttgcatatagatatcgagcaatatcaggtcgataggcgtatcgctattgaagataatctctttggctttctccagcgtgctggctgttccacagcattgaaagcctgggatttgtgctacgtatcggcgattcagctccgcgaccattgcgtcgtcatcgataattaatacattgatcatctgttgctcctctccccgtcccagggtatctggacaaaaaattgtgtgaaaatcccgggttcgctttccacggcgatgctgccgccgagattttctacctgttgtttgacaagtgctaaaccgacgcctcgctcgcttccttttgtgctgacacctttgtcaaaaatgtgatcgattttatcgggtgcgatccccggtccatcatcattaacttcacagtgcagccagccgtgacggtagtgcaatgttacgctaatttcgcctccgggttccggccctaatgcctccagcgcgttttctatcagatttcccaacgtggtaatcagcgtcgcgacctggtcctcactgccgctgtctggcagctggctttcactgtttaaaatcagcgtatggcctaaatcggtcgcgcggttaatcttgctgattaaaaaaccagcgataaccggagatttgatcttacccagcagagagccaatctcttcctgatagttattggctgttttgagaatgtaatcttccaactgcttataactcttcagatgcaataatccgagaatcacatgcaatttattcataaattcgtgggatcgttcacgaagtgcgtcagcatagttgaccagaccgtcgagtcgctgcatcagtttacgtacttcagttttgtccctgaaggtactaatggcaccgatgataacgccattactgcgcaccggaacggtgttgatcagtaatagccggtctttaatcgtaatctcttcgtcgcggcgcggggtaccgtcgcgtaacacttcgctgacatctaccacctgactccaactgtggcttagcgtgctcagtttctcatcgtcctggctcttacggtaattcagcaattcttgtgcggcatcgttgatcagcgtgacctcgccgcgatcgtccacggcaacgacgccttctttgatagactgcaacatggcctggcgttgctcaaacagcgtggagatttcgtagggttccaggccgaaaaggatttttttcagtaccttaaccagaatgcaggtgccaatcagtccgaccagcatgccaaataatacgctccagataatgctccagcgactgtcattgatctgttgggtcacacggcttaactcaaggccgatcgccaccacgccaatttgtttatgattttcatcgtagatgggggtaaatacgcgtaaagcctgcgccagaaaaccgcgattgatagcgacattttcttcgccattcagcgctttaaggatgtcatcacctttaaatggctgaccaatacgctgggcttcaggatggctgtagcgaagactttgcatatcggtaacgacaataaacagcagatcgttgcgtttgcgtacggcttccgcgatggcctggatgccactctcctgcggttttttctgcaagccctgacggatttccgggctgtcggcgagggtacgcgccactgccagtgccttgttggctagcccatctcgcgtcatatcactgatttggctgaagtaaatcagatgcaccaccaatagcacgctgaacagtaccgcactgaccattaagatcactgtggtactcaatttcatcggacgtttgcgtaacatgcggtagggcaaactatgtctcatcagcttccttgtgtgacaaatttcttaagcattatctctgatgaggcgggtaattcaaagggagtaagaatgattggctatataggggaagagactctggcaacggaaactgccagtgctgtatgaagattccggggctatgcttatagcgataatcatactgatgagagagggaaggtcatggatcaggcgctactggacgggggttatcgctgttataccggcgaaaagatcgatgtctatttcaacactgcgatatgtcagcattctggcaattgcgtacgtggcaacggcaagttatttaatctcaaacgaaagccgtggatcatgccggatgaagtcgacgtcgccactgtggttaaagtgattgatacgtgcccgagcggcgcgctgaaataccgtcataaataagcgagggtaaaatggaaatacgcgaaggccacaataaattttacattaatgacaaacaaggcaagcaaatcgctgaaattgtctttgtgccgaccggagagaatttagcgattatcgaacataccgatgtcgatgaaagcctgaaagggcaagggattggtaaacagctggttgcgaaagtcgtggaaaaaatgcgtcgggaaaaacgaaaaattatcccattatgcccatttgcgaaacatgaatttgataaaacgcgggagtatgatgatattcgcagttgatgggagagtacagagtcacgatatttttcattctctccgcgatgtgatgcaggagagcatctgaagggtagggggatgcacaaagaatgggcagagagcgcgtttttttgtcccaagtcatcccctttactgagcaaaaaaaagaatatctcctatatgagaatcatcaatcggggttaataagttttgcgtccccagagcgtttaatattgataggagtcatattatggaaggtaaaaacaagttcaatacttatgttgtttcttttgattatccaagttcttattccagtgtgttcttaagattaagaagtttgatgtatgatatgaatttctcctctatcgtggctgatgaatatgggataccacgacaattgaatgaaaactccttcgcaataacgacaagcttagccgcaagtgaaatcgaagatttaatcaggctcaaatgcttagacttaccggatattgattttgacctcaacattatgacagttgatgactatttccgtcagttttacaagtaaccaggaaggataagaagaacataaaaaatggcactattctctaaaatattaattttttatgtgattggtgtgaacatatcctttgtcattatctggtttatcagtcatgagaaaacacatattcgtttacttagtgcattcctggtcggaataacctggccaatgagtctgcctgtggcattacttttttctctcttttaagagctgtagttgagtggacccgctggttatcgtgaaacgaagcgtctctcctcaaaactggatttgcggaacgatgaacgaagcagtcgcctgactgcttcgttcattaaagtgaaatttatttctgtgggcgcatcgccgggaagagaataacgtcgcgaatagtatggctgttagtaaacagcataatcattcggtcgataccaatacccagaccagcggttggcggcagaccatattccagcgcagtcacgtaatcttcgtcatagaacatggcttcgtcgtcacctgcagctttagcattaacctgttcctggaaacgttcagcctgatcttctgcgtcgtttaattcgctaaaaccattaccgatttcacgaccaccgatgaagaattcaaaacggtcggtgatttccgggttaacatcattacggcgtgccagcggggacacttctgccggatattccgtaataaaggttggctgaatcagatgtgcttctgccacttcatcaaagatctctgtgacaatacgtcccaacccccagcttttctctaccgtaataccgatagattcagctaatgctttagcagcatcaaaattatccaggtcggccatatcggtttctggacgatattttttgattgcttcgcgcatggtgagtttttcaaacggtttgccgaaatcaaacacatgctcgccataagtgactttagtggtacccagaacctcttgtgccagggtgcggaacagactctctgtcagttcaatcaaatcgtggtaatccgcatacgccatgtagagttccatcattgtgaactcaggattatggcgaacagaaataccttcattacggaagttacggttgatttcgaatacccgttcaaaaccgcctacaaccagacgtttcagatacagctccggcgcgatacgcagatacatatctaaatccagagcattatgatgggtaataaacgggcgagcagatgccccacctggaattacctgcatcatcggggtttctacttccataaagccgcgcgcgaccatgaattgacggatagcggccagaattttactacggacaacaaacgtttgacgggatttatcgttagcgatgaggtccagataacgttgacgataacggacttcctgatcctgcagaccatggaatttatctggtaaaggacgtagtgctttagtcagcaggcgcagctcagtacagtgaatggaaagctcacccgtttgcgtcttaaacagcgtaccgcgggcaccgataatgtcacccagatcccattttttaaactgatcgttataaacaccttctggcaggctatctcttgcaacgtacagttgaatacggccaccgacatcctgcaacgttacaaaggaggctttccccatgatacgacgggtcatcattcggccagcaacgctgacttcaatgtttaaggattccagttcctggttatccttcgcatcaaactcttcgtgcaactggtcagaggtatggtcgcggcgaaaatcattgggaaacgccacaccttgctgacgtagtgccgccagtttttcgcggcgatttctcagttcatcgttaaaatcaatagcctcattggctccccgtgtttcttgttcagacattttggttcctctaaatccagctttcaatttagcgtagataaagagacagatcggtacactgtattatctgcctcgactattagtaactcagtttatcttatcgaaactaacgcttacctcaagttgatatcactaataaataaccatcaaaatggtttaaatgacttattaatctcgatttgttagtgttataaactaaaagttaatttattcataaccaattgtttttacgacagttaatcgttgctctcctgtatcatattcgtcggcgtgctaaacagaaaacgggtagcaaaggccaatacgacgatgatcgcgacacaagccaacgtccactctcccatctgagaaaagaatcgctggtaagctgcaattgccataccgctaatttggctctctgtcgtctgctgtgccacgacgcctgccagccagttggcgaccgcgcctgttgccagcatataaatcccggttaatacgccagacattttcagacgcgtgatttgcgcaatcgccaccgggtcaataaagagttcggcaaagcccattagcgccagcccggatatcatcacgcccatactcgcttgaccgtcagccgctgcatgtcgggcatcaaatgccaacaacataaagccacaagccatcagcagtaagccaaaggcaaacttcagccagacgcgcaatgtactgttgccgcggctttctgggctcgccagccaggccagtacaaccccagcgagcatcaccgcaattgcattcacgctctggaatagtgctgtaggtacttcaatattgaatgcctgacgattcacaaagcgatcgataaacaagctgatggtactgccgccctgttgtgccagtacccagaacaatgtcccgacaaacatcaacaatacaatttgccaaagagcacggcgatgttcggggaatttgatcatcatgcgggcaatgatttgtgcggcaatgaggcaaacgatcgccagcaaatatccggaccagtcgttctccagcagcagagtaaaaaatactggggctaaacagagcatcaccactaaccagctccatactggtaaggcaaatttgacactagtgagcgcttttttatccatactacgtgtggactggaaatgacgatgaccgcttaagaaaatcaacaaaccgataaacatgccgccacccgcaagggcaaagccaacatgccatccataccactgagcagccaggccgcaggcgattggggctgcgatagaaccgatattgcccgcagcatacagcaggctaaaaccgccatcacgtcgatgatcgttctcgtcgtagagctcgccaagcaaacagctgatgttacttttgaataaaccgtagccacaaataatgattgccagcgccagatacaggctaaaggtactatttgtatcaatacccagcaccacatggccaagggtcattaacagcgcgccggcaatcactgcagtgcggttgccgagcaggcggtcggcaagccagccgccgagaataggggtaacgtaaaccagagaagcatatgcgctgaacaggctgatggcatggttatcatcaaaaccaagctgatgggtgagatagagaatgagtaaggcacgcatgccgtaaaaactgaagtactcccagatttggatcgccacgatatagtatatcgcgcgcggctgactgggtgttttcatgtgttctccttatgagcaaaaaagggaagtggcaagccacttcccttgtacgagctaattattttttgctttcttctttcaataccttaacggtatagcggccatcagcctgacggtatgcaccgtgaatatcggtttcaaagcccggatagtgagcgccgatttcacacagcatctgcaggaactccagaaccggacggctttcttcggtgatcatttcacccggcattaccagaggaactcccggcgggtacggaaggatcatattggcgttaatacgacctaccatttcgtcgaggtaaacttcttcggtcataccgtgcagctctttctggaatgcagcatacggagtcattaccatcgtcggcagcacttcaaatgcgcgatacatcagatccggcagattgtggtgaacaatcagtttgtggatattctgagccagttcctgaatacgcatgttttcatagaattcaggatcttcacgatacagagacggcagcatgtttttcacacgcaggttcaggtcgaacgcacgtttaaagtcagtcagagcacgcagcaggctcagtgctttggtcttatcgataccgatgctgaacaggaacagcaggttatacggaccggttttctcaacaacgatgccatgttcgtcgaggtatttcgccacgatgctggccggaataccaaagtcgctcatggtgccgtctttttccatccccggagtcagcagggtgactttgatcgggtcaagatacatgtgctcgttatcgatgtttttgaagccgtgccaggtgctgtcagaacgcagcggccagcattcagtcgtatcgatatgatccggctgccatacatcaaagaaccagccatcagattccgttctcagacgtttgatctctttacggaatttgatcgcacgttcaatagaaccgttgatcagacgcttacctgcattgcctttcatcatcgccgcagcggtttcagtggacgccacgataccgtagtgcggagaagtggtggtgtgcatcatgtaggcttcgttaaaggtttcttcgtttacgtcacctttaacgtggatcatggaagcctgagagaacgccgccagcagtttgtgagtggactgggtttcgtaaatcactttcccttctacacggccaccgctcataccgcatttaccttcgtaaatcggactgaagttggtgtaaggcacccacgcggagtcaaagtggatggatttcacatccagtgttttcttgatgaagtcggtgttgtacagcagaccatcataggtagagttggtaattacagcatgtaccggccaggttgcgtttggtgtttctttcacgcgcttagcaatggtagcgtgctggaattcactctgtgggataccaccaagaataccgtaagcgttacgggtcgggcggaaatagattggcgtaacatcgctcatcatcatcaggtgggtcaggcttttgtggcagttacggtcaatcagaatggtgctgcctgctggagcagagtacataccaacaattttgttcgcagtggaagtaccgttggtcaccatgtagctgcggtctgcgttaaagacgcgagcgatatactgttctgcttctttgtgtggaccactgtgatccagcagagaacccagttcagatacactaatggaaatatcagatttcatggtattcggaccaaagaaatcatagaacaggctacctaccgggcttttctggaatgcagtaccgcccatgtgaccaggagtacagaaagtatatttaccttcacgaacatatttaaacagtgctttagtcagcggaggcagaatagtgttgatatattcgtcagtggtctgcttgatcttattagcaatatcttcagcagcacccagcgcatattcaaagaagctaatctgtaaacgcaggtcattcaggcttacatcgagagtggaatacgtattagcgaacgcgtacaacggcaggttctcgttcattttgctaatttcttcgcacagctcgagattatatttatcccagtcaaaaataacgccgcacagacgcgcattgttttcgatcagttttaataagtcgtcacggtcgttcgggtaaacaatctggaagttcagacgttcaagcgcgcgatgaagttcacggatgggttcttctttaaaataaacccccatgtgattcaatattgcaataacgttcatagtcatatctccaggtaaaaaaggcccctcccaacacatgggacaaaatgaaaggaggagcctcggaaaatacttttaattaatgtgcgttagacgcggtgtggttatccatactgtggctctggcgctcgtgcattttgcgagcgtagaacatcaggataatcaggctgacgatgaaggtacctgccagctcgaaggagcttgcgcccatcagcgcgatgaagcagaacacgcaacccagtacagagcagatcaggctgacaaagttgcggatgttaacgccttcaaaacgaatcaggtcaacgcaagagtagaaatacggcagcatagtcagcagtactgcgataccggtcagttcaccgaacaggtcagatgctttaccaccggcagagttcatcagagtgataaggatcatcagggcagtcattttcactgcagccagcagcagaccttttttcggaataccgttgctgtcgacttcaccataaactttcgggaagttaccgtcgttagcggcacgtacacctgcctggcctaccaacatcatccaggagcccagagaagtcaggcacgcaaaggcggtgaatgcagaaaccagcggcgcagcccagttaccgaggatagtactagcactgattgcaaacggagcaccggaagccgccattacagaagacggatacataccggaaagcacctgagtcgcagcgatgtaaacaatacctgctaaaccagtacccagcatggttgccagcggaacggtacgtttcgggtttttaaccataccagtacttacagctgcggattcaacacccacgaaggcccacaggcagagcagaatacttttaatgatcgcatgaccatcagtggtatccgcagtattccagttagctgcataagttgccgcatcaaaccaatgccagccaacaatagcagtcatcaccacaggaataagaaccagcaccagaccaatagtggttaaacggcttacccaagtaccgccgagcatatttacaaaggtaaatacccagacgatagcaatacaggcgatacccgccggaacaggatcatttaatactgggaagaaggtggaaagataagatacagcggtaataccaatcgccaggttaccaatccagttagcatggtaataaagaacacctgtctgaaaaccaaatgcaggggaaatttctccggcataagcaattgggccaccttgttgcgggttttttgttgccagtcgggcatatacatacgccaggctcattgcaccaataatagagataatccaaccccagatagcaataccaccgatacttgctaggttcgcaggtaataatgcaataccgctccccatcatattaccggcaacaacaccggtacaggcaaatagcccgatcttcttggcagaactcatgctcttctcctaatttcatttttgaatttggagtccgggtcatgatgtataactatttcctgaccagaccaaactggcgataagattactcacgaaaaaaggattaatcctaaagattaggtgaaataacacaaaagtttctgtaagtgagaacttgaggttttttattaacacatcaggatcgcaagttgatatcatgaaaagataaacatttaatgtttacaatggattgcgtgacattctctggttaaatttatgtaataaaaattatgcggcaaataaattgccgcaacatattataccaacaggaacatacaaaaactcaacaacaaatatttccgagcataaatcaacccggagttacttattcactagcaagaaatttgtcgagataaggtacaacataaggaacagaagtctggaatataccattttcaatccagtaaagggtgtttgcccctgggcgtaaattaaaggcggtgagatatgcatcagctgcttcccggttcatccccttcatttcataaaccttgccaagcaacacataatttagccaggacatttcaagatcaatgccagtatttatcgcctggtaagactcatctgttttaccttttaccagagcactgaccgcttttatttgatatataatggacaggttgttcaattccggcagtgtaacaatgttatctatttctgtgttcagtgctgctaattgtttttcatctaaaggatgttgagaatggcgcacgatatcaactaatgctttttctgctctcgcgtaggtaaattctggggaactttgaacaatctcacctaataattcactggcacggttcaaacttttatcatcgccatgcagtaaataatcatgtgcctgataaaaattagttaataacgcaccacgatgcggcaaaattttctggagcgtctcctgcattcgttgtggccacggttggtttaacgctttacttaaactctccagtaaatcattttgaatcgccagctgattaccgttagtgatgacataacgtttatccagcatggtactaccatctgcattgtctaccaattttatgctcataaagcattgttgagcacggtattggcgctgattaacaaacgcaatagataatgttttaccggaactgctcggttcatcaatgttgtagttgattttgtcatgcaccataaaggtggagaaggtgttaagacttgtcgccaccaaatcacccacgcctatcgcgtaagagagctgatacggggaactccagctgttacaacttttatttaccatattaatgtcaatatcgcgtggattgagcaaaatacggcttttgctcataggaagacgtgtatcaagactactaaacgctaccagtgctacacagatacctaagctcaacaggaaaaaaaaccatacccaaaaggtagtgaatcgtttgcttttaactggggattgttcaggtggcgttgcggtgttttgaatgttaagactgtgggagggagaatctgtggcaggaaccgcctctggtatagggggagggctagatagcattatttcctctccctcttcttcgctgtaccagataaccggcaccattaatttatagccgcgctttggtacagtagcgatatagacaggactatcttcatcattatcttttaaactcttacgtagttcactgatactctgcgtcacaacgtgattggtgacaatacttctcttccagacattatcgataagttcatccctgctaagtacttcgccactgtgttgagcaaagaaaaccagaagatcgattaatctcggctcaagggtaagttgacgcccattgcggctaatttggtttatggacggagtaacaagccattcgccaacgcgaactacaggttgttgcataatagaaactcattcgaaaagggaatgatgcaatgataattgccacaacctatttttaccatctatagatgggtttatttacatattattggtgaatgcaagacgttatttttaccagccataaacttcttgattacatagtattacgaaaggattttactgagaaccagaagtaatattccttaccatcaaaattcatcatctttgccaaagaaaaatgttcagaaaataatccatggaaaattgtccggagcacttactattttaatggattgttagtctttgcatgagcaagcgaactgatacatttctctttgttctcattcagaaaatctcatcagtcgccgttcagaccggtgttgtgctttatggatgcgttacgctcctgatgacgtcatttgacgttcaacagcatcacggggccgcacgacatttcacgtcagttagtgctatagctcaggaacaaattttcccgaattgggatatgcccgcaaattgctggtgatgtggggagaatctggttgagttcggtagaattgatttggaggcagaacgcttaaatcgtggcgtcctgaaacgaaaaacggacctccgtggaggtccgtttatatgaatttggtgcccggactcggaatcgaaccaaggacacggggattttcaatcccctgctctaccgactgagctatccgggcaacggggcgcattaaaccgtaatctgcacatctcgtcaacctaatttcagtaaaagcgattcaactgcttaagattgcggcaaatcgcttcttttctgtgtttctgtcaggtcaatgcaccaccctggcggcagcgggcgaagcgcaggatatcttccgccagccgatgtgcagtgtcgacatccgcctggctacgattcaccagcattcggcttaaacagccttccagcaccagttccatctgctttgctaccatcgccggatcgtcaacttccagtgtggttaacagttcgtgggtgaaatcgtaggccgcgcttttttgctgatcggccagttgatgaatagggtggccaggatcgggataaaacgtacaggcagcgataaatagacagcccggatagcggttgtttttaacgcactcgcttaacgcctgataacgtgccagcagcttttgttcggcggtttgcgtttcgtccagcatcagctgacgacgccagacatctatctgttggctaagataacgcagcgcatcgtagaggattgcctctttgtctggccagaagcggcgtagctcgtccagtggataatccacacgttcagcaaccatctccagcgtggtgttggcaatcccttgtaattctaataatttcagggcttctcccagtacatcttcacgttgcacgctattttcctccgtctttcccactgcaagtgtcgttcacggttggcgatcgcgcaaatgtgcgctgaaggtttcagcatccataaagcccgtgacgcgtgcttgtggatgctcctggccttgtccgtcaaaaaagagaattgtcggtaggccaaggacattaagatgctttaacagcgccacatcttgtgcgtcgttggccgtgacgttggcctgaagtaagaccgtgtctgctaacgctttttgcacctgcgggtcgctgaaggtgtatttctcaaactctttacaggcgacgcaccagtcggcataaagatctaacatcaccggtttgcctttggcttcaacgagcgcctgatttaactcatctaccgttttgatttgtgtaaagttgagatgcgtctgagtttgcgcggtatgcgtcgcaccaaatgcccaatcctgaagtgggcgcacgctaaccaatgccgctgccagcagaataatttgcacaatacgcatccagccgcgtttagcctgtaggctggtgataaaggcccagccaaagaatgcgacacccagcgcgctccacaagcgtaatccccatacatcaccaatcactcgctccagcaggaagaccggcagtgcgaggatcacaaaaccaaacgcggttttgacttgttccatccacgggccgcttttcggcagcaagcggttaccaaagacggtaattagcatcagcggcaggcccatgcccaacgcatagagataaagcgtgccgccgcccagccacatgttcccgctttgggcgatatacagcagaatcgcgctaagcggtgcggtggtgcatggactacagatcagtccggcaatcgcccccataacaaacacaccgccaggactgccgccctgttggcgattgctcatcaacgtgagacgtgtttgcaggctagaggggagttgcagggtaaacaagccaaacatactcatcgccagcaaggtaaagacgatggcgaggccaatgagcacgtatgggtgctgtagcgccgcctggaactgtaaccctgcggcggcaaccaccagacccagcgccgtgtaggtcagcgccatcccctgcacataaataaaggtcagcaacaatgctctggcagtggagagccgctgtttaccacccagcacgatgccagaaatcagtgggtacattggcagcacgcatggcgtaaaggcgataccaataccgatcaacaacgcccagagcgcggaaaagggcaattgcgcggtgggctgctcttgctgcggaacagacacaggctgtggcgctgcgttgttggcgaccacttcgcttaacggaacggttttggtttctggcggataacagaaaccggcatcagcacagccctggtaggtgacagttaacgtcgctcccgcactcgcctggttgatggtgacgggaagcgtcagccgatcgcggtaaatctcgcttttgccgtaaaactcatcttcatgccagacgccttgcggcagctgcacgtcggcaattttcgcgtgttccggcgtaatgcggatctgtttacggtagaggtagtaaccgtctttgatctgccaggtcagattaaggtcatgttggttttgctgaaaatcaaaagcaaaggcttgatccgcggggacaaattgactacgtcccggcgcgtcgaataatccggcaaaaacggaagtgctgcaaagtagcaggatcagcgtaaagatgcgttgagccatgagaggtaatctgtgtctccttatgtcagcgtaaagatgcgttgagccaactgaggtaatctgtgtctccgtgtgtaacaggtaaaaccagaagttccggggtttgatatggatgatgagacttcaggcattccagcagtgcctgctggtgagatacggtagtttttaaaatcatctgcacttcgtattcttgctccagcttaccttcccagtaatagagagaggtagcgccggggatcaaggtcgcgcaggccgccagtttttccgccagcactttggcggctaaatcctgggctgtcgcttcatctggtgccgtacatagcaccacgacagacgcggtattgctacttttttcatcaagcataaacacctcgcaagaacagatggaaccgcaagagagaggtcactatacaacggacgggggaaggatgttagtcggcgggaaagaaagcggggcgtgaacgccccgcgattgatcattacagcatgaagctacccagcacgaagccgaagcaaacggccagggcaacacccagagtacccgggatgaagaacggatggttgaagacgaatttaccgatacgggtagtacccgtgtcatccatctgtaccgcagcaaccagcgtcgggtaggtcggcagaatgaacagaccagacaccgcagcgaaagaagcaacagcggtcagcggactaacgttcagtgccagagccatcggcatcagtgcttttgcggttgcagcctgagagtacagcagagcagaagcaaagaagaagatgacggccagcagccacggatgaccctgaatcacttcaccagcggtatctttgatccagtcgatgttgttggaaacgaaagtatcgcccagccacgcaacacccaggatacaaatacaggcgctcatacctgctttgaaggtgctggagttgaggatgttgtcggtatcgactttacagataacggtggtcagagttgcaacgctgagcatgatgatcaggattgcgttggtggtgttcatcagcggtttttcaaccagacccatgcttgggctgttgatgattgcatagataaccacgccaactacgcccagcaggaacagccagacggacgtttttgcaccggatttgatttcaatctgcttttcaccgcgcagttcaaccaggccctcttccagacgcttgcgataaatcggatcgtcagagagtttggagttgaacagcatagtgaccaggaaggacatcaccagaaccgccagcagggtggacgggatgaccacggagagcagatggaggtagctgatgccatgaccttccatcacggaagacatgtaaaccactgccgcactgattgggcttgcggtgatcgcaatctgcgcggataccactgcagtagacagcggacggcaaggtttaacgccttgttccttcgcaacttcagcgataactggcagtgtcgccagagagatgttgccagtaccagcaaagatagtcaggaaataggtcacgatcggtgcgaggatcgtgatgtatttcgggttacggcgcagcagcttttctgtctgatgaaccagatagtccagaccgccagcaacctgcatggcagaaatagcggcgataaccgccatgataatggagatgacatcgaacgggatgttaccgggtttaacgccaatagcggcaagaaccagcacccccaatccgcctgcaaaaccaatacctattccccccaatctggcgcccaagaagatcgccagcaaaactatgatgagttctacaactagcatattagccttccttgttttttaacaagttgatattagattgttatttttaagttactgctcacaagaaaaaaggcacgtcatctgacgtgccttttttatttgtactaccctgtacgattactgttcgctttcatcagtatagcgttttgctttgtaagccgggtgcatcagattctgtacggagaaaatatcgtcaagttccgcttcagtcaacagaccgcgttccagaacgacttcacgtacactcttaccggtttcggcacagattttacccacgatgtcaccgttgtggtgaccgatgaacgggttcaggtaagtaacgataccgatagagttgtaaacgtaaccttcgcacacttctttgttagcagtgatgccgttaatgcatttttccagcaggttgtagcaagcgttggtcagaatgtgaacggattcgaacatggcctggccaatgaccggctccataacgttcaactgcagctgacctgcttctgctgccatggtaacagtggtgtcgttaccgatgactttgaagcatacctggttaaccacttccggaacaaccgggtttactttagctggcatgatggaagagcccgcctgcagttccggcaggttgatctcgttcaggccggcacgtgggccactagagagcaagcgcaggtcgttacagattttggacatcttcacagccaggcgtttcagcgcgccgtgaaccataacataagcgccgcagtcagaggtcgcttcgatcaggtcttcagccggtacgcatgggaagccagtaacttcagccagttttttcactgccagcggagagtactctttcggcgtgttcagaccagtaccgattgctgttgcaccaaggttaacttccagcagcagttcagcggtacgttggatgtttttcacttcttctttcagcaggatgctgaaagcgcggaattcctgaccgagggtcatcggtactgcgtcctgcagctgggtacgacccattttcaggatgtcctggaattcgacagctttacgttcaaagccttcacgcagttggttaatcgcatctaccagcttaatcagggaagagtaaactgcgatacggaaaccggtcgggtaggcgtcgttagtggactgacatttgttaacatggtcgttcgggttcaggtactgatattcacctttttggtgacccatcagttccagaccgatattggccagcacttcgttggtgttcatgtttacggaagtacctgcgccgccctggtagacgtctaccgggaactgatccatgcattttccgttgttcaggacttcatcacatgcggcaatgatggcattcgctacacttttaggaatggtttgcagctctttgtttgccatagctgcggcttttttaaccattaccataccgcgaacaaattcaggaatatcactgattttgttgttgctgatatagaagttttcaatcgctctcagagtgtgaacaccatagtaggcatcagctggaacttccctggtacccaacagatcttcttcgatacgaatgttgttactcatgtgaaccttctttttcaagctgccaatgatttgctttaaacacacagaatatatgtggtttcgaatgtttttcgaccgacgattatcccctgcatcgaccgaatacccgagatcatatgctgcttgaggatttctaccgtaatctggatcactttaagtgtcggtttttaccccttaattattaatttgtgaaatagatcaccgctttgggattactaccaaaaatagttgcgcaaacatcttgaaattttgctaatgaccacaatataagctaaacgcgattcgcaacccattcaggtagccggggttaaccggctgctattacaggagaaacctttgcgctggttaccttttattgccattttcctttatgtctatattgagattagtatctttattcaggttgcccatgtattgggggtattgctgaccctcgtgctggttatattcacgagtgttatcggtatgagtctggtacgtaaccagggctttaagaatttcgtgctgatgcagcaaaaaatggcggcgggtgaaaacccagcggcggagatgattaaaagtgttagcctgatcattgctggtttgctgcttttattaccgggcttttttaccgacttcctcggtcttctacttttattgccgccggtgcaaaagcatctgacagtgaagttgatgccgcatttgcgcttttctcgcatgcctggcggcggttttagcgccgggaccggtggcggtaatacttttgatggtgagtaccagcgaaaggatgatgagcgcgaccgccttgatcataaagacgatcgccaggattaatgtcgaaacgccggattatgtggttatgccattttccggcgtttttcgttttggcagcaacagccataaccccgccagcatgatcagcgcatagagacttttccagccgaccattgccagtaacagaacgcataacagcccgccaaccaccgccagtagtcgataacgtccttgcaataatttacagcctgccagcatgcataacagataaatcataataaagatgccattggcataaataataagagcgtccagattgatctctaaagcatgaatcaccaaagtgctcaccacacagcagccgagcaccgcattgagggcattattcgggatatggcgagaagagaggcgtgccaggtagtggtcaggattatgttgcgcctggctccagaccaggcgggcgaagctctgtatataaatgttgagactggcaaagcaggccagatagccaatcacgcaggcaatccataacgctcctacaccgaacaactgcactacaatttttggaaggcttgctgccgccgccattttttcaccataggcgtcgaagtgtaagacgactaccgtacagccccagtagactaatcctgccagcagcagaccaatcatcaaagcacgaggaaaatcacgctctggatttttaaattcgctggcgagatgggcaaatgcctccagaccgacaaaacaccagaacatcacacttaacgcagcaaataacccggtaagttcgatattaccaggtgccggaaaggggatattcgcaggtttgatatcgcccgcccaccagatagcgacaatcagcgcgacgataagtccggcaataacggtttgtagattagcactggaactggcaccgcgagtaccgatataccacaccagcgccagcgtaccgagttctgccaacaacagttgccagctatgccagccaaacatcgcctggccgaacccggcggcaatttgtagtgcggcaggcaaacccacgggaatgacgcttaaaaacagccagccggtgactcgctcaagccggctaccaaacgccataccgacgaagtgcgcgacgccgcctgcgctgggatagtggcgacccagaatcgcaaacacaatcgcaatcgggaacactaagataatcaaaacgggccacgcccacaggctgttattgcccgctaccagcgcagctaacgcaggaacggcaaacacgccagtgcctaataaactcgtgcttagcaggccaatgccctgggccagccccagttcttgtttgagtccactcatgggttgatgtccgattgcgcccaaattttgggcaactgcgtagattttcgatggtagcacaatcagattcgcttatgacggcgatgaagaaattgcgatgaaatgtgaggtgaatcagggttttcacccgattttgtgctgatcagaattttttttctttttcccccttgaaggggcgaagcctcatccccatttctctggtcaccagccgggaaaccacgtaagctccggcgtcacccataacagatacggactttctcaaaggagagttatcaatgaatattcgtccattgcatgatcgcgtgatcgtcaagcgtaaagaagttgaaactaaatctgctggcggcatcgttctgaccggctctgcagcggctaaatccacccgcggcgaagtgctggctgtcggcaatggccgtatccttgaaaatggcgaagtgaagccgctggatgtgaaagttggcgacatcgttattttcaacgatggctacggtgtgaaatctgagaagatcgacaatgaagaagtgttgatcatgtccgaaagcgacattctggcaattgttgaagcgtaatccgcgcacgacactgaacatacgaatttaaggaataaagataatggcagctaaagacgtaaaattcggtaacgacgctcgtgtgaaaatgctgcgcggcgtaaacgtactggcagatgcagtgaaagttaccctcggtccaaaaggccgtaacgtagttctggataaatctttcggtgcaccgaccatcaccaaagatggtgtttccgttgctcgtgaaatcgaactggaagacaagttcgaaaatatgggtgcgcagatggtgaaagaagttgcctctaaagcaaacgacgctgcaggcgacggtaccaccactgcaaccgtactggctcaggctatcatcactgaaggtctgaaagctgttgctgcgggcatgaacccgatggacctgaaacgtggtatcgacaaagcggttaccgctgcagttgaagaactgaaagcgctgtccgtaccatgctctgactctaaagcgattgctcaggttggtaccatctccgctaactccgacgaaaccgtaggtaaactgatcgctgaagcgatggacaaagtcggtaaagaaggcgttatcaccgttgaagacggtaccggtctgcaggacgaactggacgtggttgaaggtatgcagttcgaccgtggctacctgtctccttacttcatcaacaagccggaaactggcgcagtagaactggaaagcccgttcatcctgctggctgacaagaaaatctccaacatccgcgaaatgctgccggttctggaagctgttgccaaagcaggcaaaccgctgctgatcatcgctgaagatgtagaaggcgaagcgctggcaactctggttgttaacaccatgcgtggcatcgtgaaagtcgctgcggttaaagcaccgggcttcggcgatcgtcgtaaagctatgctgcaggatatcgcaaccctgactggcggtaccgtgatctctgaagagatcggtatggagctggaaaaagcaaccctggaagacctgggtcaggctaaacgtgttgtgatcaacaaagacaccaccactatcatcgatggcgtgggtgaagaagctgcaatccagggccgtgttgctcagatccgtcagcagattgaagaagcaacttctgactacgaccgtgaaaaactgcaggaacgcgtagcgaaactggcaggcggcgttgcagttatcaaagtgggtgctgctaccgaagttgaaatgaaagagaaaaaagcacgcgttgaagatgccctgcacgcgacccgtgctgcggtagaagaaggcgtggttgctggtggtggtgttgcgctgatccgcgtagcgtctaaactggctgacctgcgtggtcagaacgaagaccagaacgtgggtatcaaagttgcactgcgtgcaatggaagctccgctgcgtcagatcgtattgaactgcggcgaagaaccgtctgttgttgctaacaccgttaaaggcggcgacggcaactacggttacaacgcagcaaccgaagaatacggcaacatgatcgacatgggtatcctggatccaaccaaagtaactcgttctgctctgcagtacgcagcttctgtggctggcctgatgatcaccaccgaatgcatggttaccgacctgccgaaaaacgatgcagctgacttaggcgctgctggcggtatgggcggcatgggtggcatgggcggcatgatgtaattgccctgcacctcgcagaaataaacaaacccccgggcagaaatgtctgggggtttttcttttggtcatctttctagtataagattcagacacggacgacgcgagtggcgtccagctcattgattatggggaataacatgcacgtaaaatacttagcagggattgtcggtgccgcgctactgatggcgggttgtagctccagcaacgaattgagtgctgccggtcagagtgtacgcattgtggacgagcagccaggcgcagagtgccagctgattggtactgcgacaggtaagcaaagcaactggctttccgggcaacacggagaagaaggcggttctatgcgcggcgcagcaaacgatctgcgcaaccaggcggctgcaatgggcggtaacgtgatttatggcatcagtagcccgagccagggaatgttgtccagttttgtcccgacggatagccagattatcggtcaggtttataagtgcccgaactgatgtgatccagaggctgggtgacaaacgtataattgcctgatgcgcttcgcttatcaggcctacataaggcattgcaactgattgaatgcttgagaatttgtaggccggataaggcgtttacgccgcatccggcatgaccaacgatcacgttatcagtcatttcaggctggatggctccagcctcgcattagcaaagatgagattatttcgcctgtggtgcagttttgctggtggattgaacacgtaagtgatgcagcgcgcgtaagcattgatcctgggttagcggttgggcgttattcgccgctacggtgcgaacatagacctgacatggcacacccgcgagttttttcagtcgtgggctgaaatcaagcattcggcgagtgatcgcttctatttctttacccggcgttgcttcacgcgttttcaccactgcgccgctaaattgttctttgccactttcatctttaaagcggtaaagcaccgccagataatggtcgaacaagttatgtttccattccggttgggaataggtgtcatattccagattgccattgtcctggcagtcaacgtcgtataacggcaggaaatctaacagactggtaatacgtaatgccagttcacgcatttccgcattattaattgcatgaatgattgctcgcgccagcatttcaatctgcaactcattgacgactaactcacatttgctaccgtcatgtagcgttaatacgaaggtaagattttcgccttgattatcggtaagttccagcgtgttaacccgacgattaatatcggcatttttaagctcatcaaccagaatttctgggatgttttctgccattttcttaatgactttatcgcgagcttgctcatactgaaggtgtgcagcagcatccagtttatgcttttgatgcagacgactttccagcgcaatcagcaggtcgcgcagttccatgacagacataaagaacaagctttctttattgcgaggttctttaattttcagcgccagtgcaatgaaattattactcttgcgaataacaccggtattaacacccttgatgcttatggccatgtaggttctccctaaccatttctcaattaaataattaattttaatttataagccagataaatgggcttggtagtaatagttgttaaaataacataaatagccgtactcactctatataaacagaaaagaaaggttaattattggtgttagctatataaaaagtaacaacagcaatgcatatgaataattaaaggttatgcaacgggcaaagattaaacttcccagtttaatgacaggttgctgtacttgcgtttgttgctcttgccggatgcagcgtaaacgccttatccggcctacagttcattgcaaatccattcaatttcaatgcacgatgtaggcctgataagcgtagcgaatcaggcaattttaatgtttaacttccctgtttaatcagttactgctggcgtagctggagatccagcggcgttttgctgggttcgccgccaatttctcgcgccagtttcggcaccagatatccgctcaccagtgtcagcaactcacgcataatctgccgtgcttcgtcatcactcaccataaaatgcgccgcgccctgtactttatcgagcacatgcaggtaatacggcattacgccggcatcgaacaacgcattactcaggtttgccagcgtttgtgcgttatcgttcacatcacgtaacagaacgctctggttcagcaaagtaacgcctacccggcgcaacttagccatcgcctgacggaatgtttcatctacctcattggcatggttgatgtgattcaccagcaagatttgcagcgtagaacgggcaaagcattcaaccagcgcctcggtgatacgtgccgggatcacaatcggcagacggctgtgaatccgcagacgttttatatgcgggatggcttccagttgtgtgagcaaccagtccagctcgtgatctttcgccatcagcggatcgccgccggagaaaatcatctcgtccagttccggatgcgcagcaacatactcaagtgcagtttgccagttacgcttgttgccctgattttcggcataggggaagtgacgacggaagcaatagcggcaatttaccgcgcagccgcctttgaccagcaaaagcgcccggttgtggtatttatgcaacaaaccaggcactacgctgtgctgttcttccagtgggtcggtggagaatccgggcgcgatgacaaactcatcttggctggtaagtacctgacgcaaaagaggatcgtccggattgcctttctccatgcgatcgataaaactgcggggcacacgcagggcaaaaagctttttggcgctgcgtccggctaacagtttttcctccgcgtctatattcaaaagacgcagaagttcatcaggatcggtcacaacatcggcaagttgcgttaaccaatcttctctggatggggtatttagggttacaatatgcgccattttgtggcttagctaccaattaacaaatttcagagggccttatggcaacgtactatagcaacgattttcgtgctggtcttaaaatcatgttagacggcgaaccttacgcggttgaagcgagtgaattcgtaaaaccgggtaaaggccaggcatttgctcgcgttaaactgcgtcgtctgctgaccggtactcgcgtagaaaaaaccttcaaatctactgattccgctgaaggcgctgatgttgtcgatatgaacctgacttacctgtacaacgacggtgagttctggcacttcatgaacaacgaaactttcgagcagctgtctgctgatgcaaaagcaattggtgacaacgctaaatggctgctggatcaggcagagtgtatcgtaactctgtggaatggtcagccgatctccgttactccgccgaacttcgttgaactggaaatcgttgataccgatccgggcctgaaaggtgataccgcaggtactggtggcaaaccggctaccctgtctactggcgctgtggttaaagttccgctgtttgtacaaatcggcgaagtcatcaaagtggatacccgctctggtgaatacgtctctcgcgtgaagtaatgcggttgtggtgcggcctgcaggctgcaccatcacttattcaggtcagagatgatgaaacgccttatcgttcttgttttgcttgccagcacgctgctcacgggctgtaacaccgctcgcggtttcggcgaagacatcaaacatctcggcaactccatctctcgcgctgccagctaatttttcttctcttccgaaaaatcatcagattcccatcatttttggcgatgttgtctattattaatttgctataggcaaacataaataacattacctaaaaggaagacgttatggtgaagaagacaattgcagcgatcttttctgttctggtgcttagtacagtattaactgcctgcaacaccacgcgtggcgttggtgaagacatttctgatggcggtaacgcgatttctggcgcagcaacgaaagcgcagcaataagcaataacggtacgacagctgtgtcgtgccgtttgttttttctgcgatagtcacaaaggtaatagttgaaattcccctgccacctggcaaaatatccgttcaaccatcagctttgcaggacgacctgcaaacgcctcttttcaccggggacggccccaattctccggagcctgatatgtcctggattatcttagttattgctggtctgctggaagtggtatgggccgttggcctgaaatatacccacggctttagtcgtttgacgccgagtgttattactgtgacggcgatgattgtcagtatggcgctacttgcctgggcgatgaaaagcttaccagtagggacggcttatgccgtgtggacgggtattggcgcagtcggcgcggccataaccggcattgtgctgctcggtgagtccgctaacccgatgcgcctggcgagtctggcgttaatcgtattggggattattggtctgaaactcagcactcattaactaccaggctgctgtacccaaataaatttactgacatcaaacccttcccgggtcgcgactgccagcatctcctgtttcacttcgtcagaaatggttggcgtgcgggagagtatccacaggtagtcgcggtccgggccgcaaaccagcgcatggcggtattcccgatcgagtgcaataacgttataaccgccatagaaaggaccaaagaaactcactttcagcgcagcgcgagttggtgcgccggtaaagtacgctttcccttcactctgctgccacattcctctgtcagggttatagcctttattaatgacattcaggccgccgtcatcacgcaggctgtatgttgcggtgactttttccagtccacgttcaaagcggtgatcaaaacgggcaatctcataccaggtaccgagataacgtttggcgtcgaaattatttactacggtcacgccacgcggcggcgtaggagaactgcaggcaacgaccagaaatgcagctgtcgctgcggcaacgagagggagcaggcgcataaatgtttccttactggtttttttctaagtgtagatgacagcaaggaaaagcggagaaaaggtccgaaaattcggacccgatggaattttactgtagagcgttaagaatctgccaggcggcgtcgactctcgctggattgggatagtttttgtttgccagcatcacgatacccagctctttttctggaataaacgcgacatagctaccaaatccgccggtcgcccctgttttatgtacccaacttgcgcgtactgcaggagttgggggcgtaatcgcttttacggggcgtgctgccagtgcaattttattgtcactgccgttaatgatgctgtcaggatttaccggccagtccagcatttcccagcccaggccctgatacatatcgccggtttgccagtagcgagattgtgccagttgtatcccttgttgaagcgttttctcattgatatcaaggggttttaaattgctttgcacccagcgggccatatcttcaatggtgctcttcacaccataagcttcagcatctaacgccccagggctaacatgcactgccttaccttcgcgatatccccaggcgtaattcttttcttctgcgggcggtacattaatccacgtatggttgagtttgagtggctggaagacacgagtttgcatcgcctgctcaaaactcaaaccagacggcttcacagccagtgcgccgaacaaaccgatactggagttggcatacagacgttgtgttcctggagcccatgcaggctgccagttttgatagaagcgcagcaagtcgctactggatttcacctcatccggcacctgcaatggcaggccgccagcagtgtaggttgcgagatgtaatagtgtgatcccattccactgtttagcggtaagttcaggccagtattttgttgtgggatcgcttaacttgatttcccctcgagcaatagcgtcgccaccaagcacgccagtaaatgttttgctgacgctacctaactcaaacaacgtttgctgtgtgacgggctgctttttggcgatgtccgcatagccccaggtaaagtaataaggtttaccctgataaattaccgccaccgccatacccgggatcttttgttgctctataagcggggtaattgtgcgatgcacaatatcgttgatttgttgaggggcagcaaatgtggagcaagaggcggtaattaataaggcgcagagcgtcgttttgaacatagggtctggtttccatacaaaacggcccgccataggcgggccggatttacattggcgatgcgttagattgtaacgacaccaatcagcgtgacaactgtcaggatagcagccagaccgtagaaaacccatttgcccgcaggtacgtggattttcagatcgtgcatcgcgtggtgcatacggtgtaaaccacaccacagcggcagaacgatcatcaggaacaggaatacgcgaccaatgaagctctgcgcgaacgccagaacgcgctcgtagctcagcgcatcacccggaaacaaccccagtggcagcagaatacccaccagcaggatcatcaccggcgcaatgatggcgctccacataccaccggccccgaagaggccccagaataccggttcgtcagaacgctttggatttggattaatcatctcaggctccttaccagtacagggcaacaaacaggattacgatggtggcaaccacagttaccgcccagagacttttgataattggctctggtcccattttttcgtcttttacaatgatattggccgctttcggtgccagttcaaaccaggttttggtgtgcagcagagctgccgccagagtgatcaggttaatgatcacgataaccgggttttgtaaaaagtcgacgaatcccgcccaggcttccgggccatttttcagggcaaacagcccgaaaatcagttcaatgctgaaccacacagccggaaccgccgtgccttcgcgcagcatgtaaaagcgataaaacggcaattttttccaccaggtggacgtcattggccgtacatacggtttacgtttagtcgtcatgttgcactccttagcgtggtttcagggtcgcgataagaaagtctttgctactttctactttgccctgctgaatggccgcagccggatcgacgtgtttcgggcagacttcggagcagtagcccacgaaagtacagctccatacgccgttctggctgttcaactgcgccatacgctccttcttaccgtggtcgcggctatcttcgttataacgatgcgccagcgtaatggcagccggaccgatgaactctgggttcaggccaaactgcgggcacgcggcgtagcacaaaccacagttgatgcaaccggagaactggtgatacttcgccatctgcgccggggtctggatgttagtaccctgatccgcggtgcgggagttgccgatgatgtacggtttgatcgcttccagactttcgatgaagtgggtcatatcgaccaccagatcgcgttcaatcgggaagttagctaacgcttcaaccttcataccgtcggtgtaatcacgcaggaaggttttacatgccagttttggcacgttgttaaccatcatgccgcaggaaccacaaatcgccatacggcaggaccagcggtagctcaggtccggtgccaggttgtctttgatgtagcccagcgcatccagtaaactggtagttgcgtcataaggcacttcatagaatgcgctatgcggtgcggtatcgacttccgggttatagcgcaccacctcaattttcaggtttttcatctcagccattcgccttctccttcttattggctgcttccgccttatcggctgcatccgcttcgccaccgtaaacgcgtttagctggcggcagcgtagtaatcttcacgtcgctgtactccaggcgagtcgtgccatcagcatcgcggaaggcgagggtgtgtttgaggaagttgacgtcgtcacgctcggtgcaaccttcgtccagacgctggtgcgcgccgcgggactctttacgtgccattgcggagtgcgccatacattcagcaacgttcagaccgtggcccagttcaatggtgtagagcaggtcggtgttgaacacgctggaagtgtcggtgatgcgcacgcgcttgaagcgttcctgcagctctgccagcttgtcgatggttttctgcatcagttccggcgtacggtagataccgcagccttcttccatagccaggcccatttcgtcgcggatcttcgcccagttttcgccgccatcctggttaaccagatctttcagacgttgttcaacgccagctgcctgcgcttcaattgccgcttcgttgccattaccggcagttgctgcacgctctgtcgcttgttcaccggccagacggccgaagaccaccagttccgccagggagttagaacccagacggtttgcaccgtgcagaccaacagaggaacattcacccacggcgaacagacctttaatgcgggtttcacagttctgatcggtttcgataccgcccatggtgtagtgtgcggtcggacgtaccggaatcggttctttaaccggatcgacgccaacgtacgctttcgccagttcgcagatgaacggcagacgttcatgcagttttttctcgccgaggtgacgcaagtcgagataaaccacatcgccacgcggcgtggagatggtgttgcctttacgccattcgtgccagaaggcctgagagactttgtcgcgtggacccagttccatatatttgtttttcggctcgcccagcggagtttccgggcccatgccgtaatcttgcagataacggtagccatttttgttgaccagaataccgccttcaccgcggcaaccttcggtcatcaggataccggaacctggcagaccggttgggtgatactgaacgaattccatgtcacgcagcggaacgccgtggcttagcgccatacccataccgtcaccggtaacgatgccgccgttggtgttgtaacgataaacgcgacccgcaccgccagtagccataacgaccgcgttagcacggatctgcaccagcgtgccttccatcatgttcattgctaccaggccgcgaacatgaccatcatcaaccagaatatccagcacgaaatgttcgtcaaaacgctggatctgcgggaattgcagagaggtctggaacagcgtgtgcagcatatggaagccggtcttatcggcggcgaaccaggtgcgctcgattttcatgccgccgaagcgacgtacgttgacgctaccatccgggcgacggctccatgggcatccccacagttccagttgggtcatttcggttgggcagtggtggacgaaataatccacgacatcctgctcacacaaccagtcgccacccgctactgtatcgtgaaagtgatattcgaagctgtcatgatcctgcgcgacagcggcggagcccccttctgcagcaacggtatggctacgcatcgggtatactttactgattagtgcgatttttgcattcggatttgcctgcgcggcagcaattgcagcacgtaatcccgcgccaccggcgcctacaatggcaagatcggcttgaaaggtttgcacgacattcctccagattgtttttatcccacagccacgtacttcagggtaagtacctgaaagttacggtctgcgaacgctattccactgctcctttataggtacaacagtatagtctgatggataagtctgaaatttgacgagatcgatttttttagtgcgcaagagggctaaattatcactgaagatgattaatttaattactaaaccatcagatcgtgctttttttagtcactgcccaccgctgtttgattcctgcgtaaaatttgtctcgccgtcgcgttgcgagtagacttcgtgcccttgtcaaaaactggagatttaactatgagcgaaacggcatcctggcagccgagcgcatccattcctaacttattaaaacgcgcggcgattatggcggagatccgtcgtttctttgccgatcgtggagtgctggaggtggagacgccttgtatgagccaggcgacggtaaccgatattcatttggtcccgtttgagacacgtttcgttggccccgggcatagccaggggatgaatctctggttaatgaccagcccggaataccatatgaaacgcctgctggttgccggttgtgggccggtattccagctgtgccgcagcttccgtaatgaagagatggggcgttatcacaaccctgagttcactatgctggagtggtatcgaccgcactatgatatgtaccggttgatgaacgaggtggacgatctcttacaacaggtgctggactgcccggcagcagaaagcctttcttatcaacaagctttcttgcgttatctggaaattgacccgctctctgccgacaaaacgcaactgcgggaagtcgcagcgaaactggatttgagcaatgttgctgataccgaagaagaccgcgacacgctgctacaattgctgtttacctttggcgtagagccaaatattggcaaagaaaaaccgacctttgtgtaccactttccagccagccaggcaagtctggcgcaaatcagtaccgaagatcatcgggtcgctgaacgctttgaggtttattataaaggtattgagctggcgaatggtttccatgaattgacggatgcccgtgagcagcaacaacgctttgaacaagataaccgtaagcgcgcggcgcgcggtttgccgcagcaccccattgaccagaatctgattgaagccttgaaagtcggtatgcctgactgttccggcgtggcattaggtgttgatcgtctggtgatgttggcgctgggcgcggagacactggctgaagtcatcgcctttagcgttgaccgggcataattctgaaaaattactgaattaacagcgaagaatggcgtgataagcgccattctgtagcatatgttttcatttttccgttaaaggccacaatttaagactggatatttgatatcatccaggtatcaattctgtattggtttttacgctgcctgctcaatgttgcgcagtgcagttcagtgggcacgtgttatacacgcgctgaaatgaaggatggtttcatgcctcacacgataaaaaagatgagtctgataggactcatattgatgatctttacttccgtatttggatttgccaatagcccaagcgcttattacttaatgggttatagtgcgattcccttttatatattttctgcattgttattctttattccattcgccttaatgatggctgaaatgggagctgcttatcgcaaagaagaaggcggtatctattcctggatgaataatagtgtcggaccacgttttgccttcattggtacgtttatgtggttttcctcttatatcatctggatggtgagtacctccgcgaaagtttgggtaccgttcagtacattcctctatggtagcgacatgacccagcactggcgtattgccggactggagcctacgcaggtggttggtctgctggctgtggcatggatgattctggtcaccgtcgttgcttctaaggggattaataaaattgcccgcattactgcggtgggcggtattgcagtaatgtgtctgaatttagtattgctgttagtaagcattactattttgttattaaatggtgggcatttcgcgcaggatattaatttccttgcaagtccgaacccgggttatcagtccggtctggcaatgctaagctttgtggtatttgccatttttgcctatggcggaattgaagcggttggtggtctggtcgataaaacggaaaatccagaaaagaactttgccaaaggtattgtttttgccgctattgttattagtatcggttatagcctggcaatatttttatggggcgtcagcacaaactggcagcaggtattaagtaatggttccgttaacctcggcaatattacctatgtgctgatgaagagccttgggatgacgctgggtaatgcactgcatttgagtcctgaagcgagtttgagcctgggcgtatggtttgcgcgtattactggacttagcatgttcctcgcctataccggtgcgttctttacgctttgctatagtccgttgaaagccatcatccaggggacgccgaaagcattgtggccggaaccgatgacgcgcctgaatgcgatggggatgccgtctatcgccatgtggatgcagtgcgggttggttactgtcttcatcctgctggttagctttggtggcggtaccgcaagcgcgttctttaacaagctgacgctgatggcgaacgtgtctatgacgcttccttacctgttcctcgcgctggctttcccgttctttaaagcacgtcaggatctcgacagaccgtttgtgattttcaaaacgcatttgagcgcaatgattgcgacagtggttgtcgtactggtggtgacatttgcgaacgtcttcaccatcattcaacctgtggttgaagccggagactgggacagcacattgtggatgattggcggccctgtcttcttcagcctgttagcgatggcgatttaccagaactattgcagcagagtggcaaaaaatccgcagtgggcggtggaataacccgatgccctatcgtctacctgacgatagggcgtaaagacaggaaatgttatggatgacaccagccgggacccggcaataaccgaagatgaaatcagggcgctgcaattttctgccggggatgtagcggaaatagagcagacgattctctcttttgtcgatgcctgccacacccgtaaagtggcgatggtggtgggtagcaccattaacaccctcaaagatcgcgatggtaaacggtggggaaacctgccggatatttattgcgcttatcttatccgatgtctggtttttcgcggggaattagtgggatacggcgatttgtttcgtatgcgctatagcgaaattaagcgaccggttaccttatgagtgcgcgcatgtttgtcttatgctgcatctggtttattgtggcgttcctctggataaccatcacttccgcgctggacaaagagtggatgattgatggacgcgggattaacaacgtctgcgatgtgttgatgtatctcgaagaagacgatacccgtgatgttggtgtgataatgacgttaccgctctttttcccttttctctggttcgctttgtggcgaaaaaaacgcggctggtttatgtacgccaccgcgctggctattttcggctactggctgtggcagttttttctgcgctatcagttttgtttgtgagccggattggttcatccggcacacaaacttacaaacttcccgcctgacgacctttgcccgcagacgtcagcgttctccccgtttgtttaccgttgaggctttccagacgcatctggaagggcgggaatggcatatcgataccgtgggcatggaagccagccagaatcagctggtggatctcatggcgtagcggcatacggtgacccatctcagcggcgtaaatacgcagctcgaaaatctgaatcccctgttgcagatccaccaggaagacttccggtgccgggttgtcgatcaccaggctgcagcgacgcgctgcggtgagcaggatttccgtcacttcttcgctattggcatcggcaggggccggtatcgtcaacaccacgcgcgtgacgctgtcagagaggctccagttgataaactgctcggtaataaacgccttgttcggcacgattatctctttacggtcccagtcgctgatggtggtggcgcgggtgttaattttcgtcacgctaccggtgagatcgcgaattgtcaccgtatcgccaatgcgaatcggtttttcgaacaggataatcagaccagagataaagttggcgaaaatttcctgcaaaccaaaaccgagaccaacaccgagcgcggcaaccagccactgcaatttgctccactcaataccaatcatactgaagccgaccagcccgccaatcagcatcagcagatatttggtgatggtggtgatggcgtaacccgtacccggcgttaaatccaggtgctgcaaaatcgccagttccagcagcgcgggcaagttgcgcaccagctgcgtggtgatgataaacaccagaatggcaatcagcaccgcaccgagggtaattggctccagactttctacgccctgtaccgtggaggtgacatcccacaggctaatattttcgaggaagccgaaagcggaatggatttcactccacagcacaatgacagaaagcagggcgatcaacatcaaaatactgcgcaccagccgcaaggattgcgcactgatggcatcgagatcgacttcgctttcatcgacttcaattgctccttccgggctactgtgatgatgcgcttcctcttcgccacgcgcacgttgcgctaacatctctgcccggcgatgcttcgcccgatcaaacgccagcctgcggcgctggatcagcatccagcggcggataacgtgataaaccaccagtagcaggaaccagatggcaacgctggtttcaagcctcgctaacagcgcctgtgccgttgccagataacccaccgcgctcgccagaatggcaaccaacggcgcgccaatcatcatgttccacagcatatggttggtaatgttgtcgccgctgccctctttgttgagatacagcggaatcccggcctttttcaggctgagggtgaccaccgccagcgcaccgcaaatgaggataaagcaaagccgtcccaggctaccggagaattcacggtcgtcgaggttatcgaacatcatcagcgccataatcagcggcacaataagcccgatgctcatcaggtagtagcgcatcccacgggaaacacgttcgcgcggccagccaaaatgagcgataaacaagccgttcgggcgggcaaaggtggcgcaaatcatcactacccacagcagcggcacggtggccgttacaccatcgccaatcgcgaccgccagcggataaggccacgcctcgcgcaagccgtaacccagcgtcatccacagcaccggtaacggactcgcgacgagaatgctccagaaaagagtgcgcaacgtcagccagaagtgatcctgagtcactttgccaactttcgccgcgctacgttcaagaaaacgggtgaaatagcggcggctgtaaatactgcaaccgaccagaatcaacgcgccaaacagcggcaaaattgtctctttgctggtcagcatcatcacactggctttgcccaactgactgaaggtgtccaggctaatgagacgacgcagatcctgggcgatttccagcggccaggcgatggtcatcgggcgcacgtcagaggtccagaacagatagcggtgcgttgcttcgttcacctctttcagcgcatcctccagttgcccgttggagactttcagcttggtcagttccaatagtagcgtgtcgccaccctgcaacaaactgttcagcaactcacgctgagtgcgcagttgtgcttccagaatacggttttgctcggcagtcagcggctgaccgtcggcctgatgaatttgccgtagcagcggctgtttattaagcagatcctcataacgtaaccgttgcacacgcaactgcgccatttcggtatcaagctgttgtggtttcggcatttccggcagccgtgccacctgcgcccgcagcgcttcgccgagcagattggagcttcccagccattggctctgttcacgcagcgtattcaacgcctgccggacctgtaacgtctggctggcagcctgacgctgttggctggcaacgagatccatccgctgcgcctgttgattcaaagccgcgcttagttcgcggttaattttgaattgcgcgacgatatctttcggcaaatcggcgctgttttctgccagcaattcggtactttccagcgcccgctccgcctcaagctgacgttggctgtttaattgattacgcaaggcctgcaaatacgcatccagttgctggctctctttttccgccagctcactgcgtaagcgcgctaattcctggcggttattggcagacagctgcgccagctccagttcatcaacgagcgccttaagacgtgcagagtcagactgcaacgcgaaattttgtgcctgattgagcggagtattgccggtaagcgttcccaggcggcgctcgatctcatttaactgacggcgggcgtcggtttgctgttgcggcagttgattcaggctatcggcaatctcgcgggcgcgctcctgctcttgctgggcctgacggcttttatccagcaactggctgctgacctggagaatttcctgattcagcgcgtcggtagacattcccgggctcacgctgcgcggctcgtcacgcatgttgtttaattgtgcgcgcagagtagcggagagtttcggataattatcgataacttgctgatattgtttgatgcgctcaagggaaccttttcgttcctcaagcgcatttaaggcagactggagcgcctctacgacttccggctgtgcgggtttcgccgcttttgcctgctccagttcctgagtgatttgtttgctatcgggggccgtcgcggcgtacgccccccaactgaggcaccaggccatcagaaaagtgataatcaggcgcacgtcagcgtttcctttgatggattagacctggtcttttttgtcgtcaaccaatgggctggcgtcgtgttctgcttcgatctcttcagcaggaagcggggcaggttcagcgtctggcgtaacaaaggtttcggtagatactgccagcggctggccaattttcgtgacagacaggctttccagttgctcaaccagattcactttacccggtgcaaacaggttgataacggtggaaccgagtttaaagcgacccatttcctggcctttcagcagtgccacagaaccgtcgttttccccggcaggccaggtccagcgcttgatgataccttcgcgcggcggcgtaatggtgcccgcccagaccgtctcaatgctgccaacaatcgtcgctccgaccagaatctgcgccattgggccaaattcggtatcgaaaaggcaaatcacgcgttcgttacgggcaaacagattcggcacgttctgagccgtgagatggttaacggagaagagatcgcccggcacgtagatcatctcacgcagaataccgttgcacggcatgtgtacgcggtggtagtcacgcggggagaggtaagtggtcacaaacgtaccgttgcggaacaggtccgccatcagatagttgcctgccagcagggcttcgaggctgtagttgtggcctttggcttgcaggattttatcttcttcgattttacccaactggctgataacgccatcggcaggcatgaccagtacattcggatcggtatcgattgggcgtacttcgtcacgcagcggacggacaaagaattcgttaaaggtgcggtagctggcggtgtccggcttttgcgcctctttcatgtcgaccttgtagtatttaacgaacagatcgataaccagttttgtcagccatcctgcccgcttgcttgcgccccaacccgccaggcgagtaagccatagtttcggcagaatgtactgtaggctaagtttaaaactatttaacaaggtagcctccaggccattgttttgtcgttcctgatccggcctacatgccggatcctgaaaaaaaggggacgattctaacgacggttagcttaattgtcagtcatccgtatcagaaaagtttttacgcgtttttacctgcgccatgctttccagaatacggtgatagttttcgaaacgggtttccgcgattttcccttcctcaaccgcttcccggatagcgcagcccggatcggtatcgtgtttgcaatcgcgatatttacacagacctaaatagtcatggaattcgacaaagccctgagtgatttgttccggctccaggtgccagaggccgaactcacgcactcctggggagtcaatcacatcaccgccgtgcgggaagtgatacagccgagcggcggtcgtggtgtgctgaccgagcccgctgttgtcagagatatcgttggtcaggatctctttttgcagccccagcaacgcattcagcaggctggatttgccgacgccagactgcccggcaaaaatgctgatgcgcccggtcaacgcctcttccagcggttttagcccatcctgagtatggctggaaaccatcaatacgcgataaccgatattgcggtagatatccatctgctcgttgacgaacgccatgccttcgtcgtccagcaggtctatcttgttgagcacaataatcggctcaatctgcaaggtttcgcaggccaccaggtaacggtcgataatattgaggctcagctccggcaaaatggcggagacaatgacaatctggtcgatgttggcggcaataggttttacgccgtcgtagaaatccggacgcgtcaacacgctggtacgctcatgcaccgcttccacgatccctttgacatttacgccttccgccgccggtttacccggacgccagactacgcggtcgccggttaccaggctacggatggtacggcgaatattgcagcggtgaacgtcgccatcggcggattccacatcagcgtgcataccaaagcggctgatgacgataccttcatcaggctcgccaaacagattgtcgtcgtagtcgggcttctccttagacgttttaagacgacgctggtgattggcgttcacgcggcgctgctggcctttggagagtttatttttactcaatcgtacagactcctggtcgcccctgatgggcaaaacatctatgatacacgcaattgtggatcaatatagtcactgtgaatgggtggaaaatagcatgagtgccaatgaaaacaacctgatttggatcgatcttgagatgaccggtctggatcccgagcgcgatcgcattattgagattgccacgctggtgaccgatgccaacctgaatattctggcagaagggccgaccattgcagtacaccagtctgatgaacagctggcgctgatggatgactggaacgtgcgcacccataccgccagcgggctggtagagcgcgtgaaagcgagcacgatgggcgatcgggaagctgaactggcaacgctcgaatttttaaaacagtgggtgcctgcgggaaaaagcccgatttgcggtaacagcatcggtcaggaccgtcgtttcctgtttaaatacatgccggagctggaagcctacttccactaccgttatctcgatgtcagcaccctgaaagagctggcgcgccgctggaagccggaaattctggatggttttaccaagcaggggacgcatcaggcgatggatgatatccgtgaaagcgtggcggagctggcttactaccgcgagcattttatcaagctgtaaaatttttcctggtcacgtaagcgccggaatccacttgcggcggcgtgattttgacgctaaattgaacgtcttgctgataatttcagcacttgagataaaaacgcaaaaaaaacttttttggggggttgcagagggaaagatttctcgtataatgcgcctcccgtaacgacgcagaaatgcgaaaattacgaaagcaaaattaagtagtacgcgggaatagctcagttggtagagcacgaccttgccaaggtcggggtcgcgagttcgagtctcgtttcccgctccaaaatttgaaaagtgctgcaaagcacagaccacccaagcgggaatagctcagttggtagagcacgaccttgccaaggtcggggtcgcgagttcgagtctcgtttcccgctccaaaatttgaaagtgctgtaaggcacagaccacccaagcgggaatagctcagttggtagagcacgaccttgccaaggtcggggtcgcgagttcgagtctcgtttcccgctccaaattcttctctcaataaaatatccacagcgacgcgatgcgttattgctggtttttgttgtctctgacaaactcttgtaaacagagttatccacagcctcaggctgtaatcttaatttcaaagaaacttcgcacggtgaatagtatttttttaacctattgatagataagttaaaaattaagattccgttttgtcgagtcgatcacttgacgattttattcgtcttgaattgcaatgcgtttttatttttattcacaagctgtggatgaatcaggcgtcacgcggtaaccctttttcaatcacccgaaccagacgctgttttttcggcaattgcacttcgactatgcacgcatttcgtctctctatttgctgcgcaatcgcccacgctatgtgctcatcgagaagtgggtgctcacctttacgactttccagcgctgtcaaaatcgtttcatcccaaggggcattgcctaatgctacggcgatattacgcagccaacgcaggtgaccaatacgacgaatcgcgcttccttccgtgacttttaaaaacttctcttcgctccaggcgaataactcaatgagttccggtgcgtgtagcggcttacgcgggctgaaatcctcttctgtggtgagttgactatagcgattccacgggcagataagctggcagtcatcgcaaccgtaaatacggtttcccattaacggtcgcaactcttccgggatcgccccttcaagttcgatggtgagataagagatacagcggcgagcatcgacggtatatggctcgacgatggcaccggtcgggcaaatcgtcatacaggccacgcatttgccgcatccttcctcgactggttgatccacgggcagcggaatatcgaccagcaattcgcctaaaaagaagaagctaccggcctcgcgattgaggataagactgtgcttacctgtccagccgagcccagctttttcagctaacgggcgctcgagaataggcgcagaatcgacaaacggtctaaaattcaggctaacacaatgttgctgaatcatctcgcccagctttttgagtcggttgcgcagaagtttgtgatagtcacggcccagcgcataacggctaacatagccgagtttggggtttttcagcgtgctggcaaatgcggcgttagcaggaaggtaattcatccgcacgctgatcacgcgcagcgtaccgggcaataactcatgagggcgagcgcgcagcataccgtgacgtgccatccagtccatttcgccgtggtattgtttgtccagccatgcttgcagtttgggctcggactcgctgagatcggtatcggtaatacctacctgctgaaagcccagttccagcccccactgtttaattttttgcgctaactgattgagatcgaggggctcactcatgacggaccatacaatgaagaaaaaccccgtaagtataccacacaccgtctggtacgccgacgatatccgccgcggagaacgcgaggcggcagatgtgctggggctcacactctatgagctgatgcttcgcgctggcgaggccgcattccaggtgtgtcgtagcgcgtatcctgacgcccgccactggctggtgctgtgcggtcatggtaataacggcggcgatggctacgtggtcgcgcgactggccaaagcggtcggcattgaggtcacgttgttggcccaggagagcgacaaaccgttgccggaagaggccgcgctggcacgcgaagcatggttaaacgcgggtggcgagatccatgctagcaatattgtctggcccgaaagcgtagatctgattgttgatgcgctgctcggtaccggtttgcggcaagcgccccgcgaatccattagccagttaatcgaccacgctaattcccatcctgcgccgattgtggcggttgatatcccttccggcctgctggctgaaactggcgctacgccaggcgcggtgatcaacgccgatcacaccatcacttttattgcgctgaaaccaggcttgctcactggaaaagcgcgggatgttaccggacaactgcattttgacagtctggggctggatagttggctggcaggtcaggagacgaaaattcagcggtttagtgcagaacaactttctcactggctaaaaccgcgtcgcccgactagccataaaggcgatcacgggcggctggtaattatcggtggcgatcacggcacggcgggggctattcgtatgacgggggaagcggcgctgcgtgctggtgctggtttagtccgagtactgacccgcagtgaaaacattgcgccgctgctgactgcacgaccggaattgatggtgcatgaactgacgatggactctcttaccgaaagcctggaatgggccgatgtggtggtgattggtcccggtctgggccagcaagagtgggggaaaaaagcactgcaaaaagttgagaattttcgcaaaccgatgttgtgggatgccgatgcattgaacctgctggcaatcaatcccgataagcgtcacaatcgcgtgatcacgccgcatcctggcgaggccgcacggttgttaggctgttccgtcgctgaaattgaaagtgaccgcttacattgcgccaaacgtctggtacaacgttatggcggcgtagcggtgctgaaaggtgccggaaccgtggtcgccgcccatcctgacgctttaggcattattgatgccggaaatgcaggcatggcgagcggcggcatgggcgatgtgctctctggtattattggcgcattgcttgggcaaaaactgagcccgtatgatgcagcctgtgcaggctgtgtcgcgcacggtgcggcagctgacgtactggcggcgcgttttggaacgcgcgggatgctggcaaccgatctcttttccacgctacagcgtattgttaacccggaagtgactgataaaaaccatgatgaaagcagtaattccgctccctgaataaggaagtgactgataaaaaccatgatgaatcgagtaattccgctccctgatgagcaggcaacattagacctgggcgagcgggtagcgaaagcctgcgatggcgcaaccgtaatctatctgtatggcgatttaggcgcaggtaaaaccacctttagccggggctttttacaggctctgggtcatcagggtaatgtcaaaagccccacttatacgctggtcgaaccctatacgctcgacaacttaatggtctatcactttgatttgtaccgccttgccgatcccgaggagctggagtttatggggatccgcgattattttgccaacgatgccatctgcctggtggagtggccacaacaaggtacaggtgttcttcctgacccggatgtcgaaatacacattgattatcaggcacaaggccgtgaggcgcgcgtgagtgcggtttcctctgcgggtgaattgttgctggcgcgtttagccggttaacctttgaaaggtggcgggatgatgtatcgcatcagaaattggttggtagcgacgctgctgctgctgtgcacgccggtgggtgccgcgacgctctctgatattcaggtttctaacggtaatcaacaggcgcggataacgttgagttttattggcgatcctgattatgcgtttagccatcaaagcaaacgcaccgtggcgctcgatatcaaacaaacgggcgtgattcagggactgccgttgttgttcagcggcaataatctggtgaaggcgattcgctctggaacgcctaaagatgcacaaacgctacggctggtggtcgatcttaccgaaaacggtaaaaccgaagcggtgaagcggcagaatggcagcaattacactgtcgtctttacgattaacgccgatgtgccgccaccgcctcctccgccgcccgtggttgcgaaacgcgttgaaacgcctgcggttgtcgcaccgcgcgtcagcgaaccggcgcgcaatccgtttaaaacggaaagtaaccgcactacgggtgttatcagcagtaatacggtaacgcgtccggcagcgcgcgcgacggctaacactggcgataaaattatcatcgctattgatgccggacacggcggtcaggaccctggcgctatcggccccggtggtacgcgggagaaaaatgtcaccatcgccatcgcgcgtaaattgcgtactttgctcaatgacgatccgatgtttaaaggcgttttaacccgtgacggggattactttatcagcgtgatggggcgcagtgatgtggcacgtaagcaaaacgccaatttcctcgtgagcattcacgctgatgccgcaccgaaccgcagtgcgactggcgcttccgtatgggtgctctctaaccgtcgcgccaacagtgaaatggccagctggctggagcagcacgagaaacagagcgagctgctgggtggggcgggtgatgtgctggcgaacagtcagtctgacccctatttaagccaggcggtgctggatttacagttcggtcattcccagcgggtagggtatgatgtagcgaccagtatgatcagtcagttgcaacgcattggcgaaatacataaacgtcgaccagaacacgccagccttggcgttctgcgcagcccggatatcccaagtgtactggtcgaaaccggttttatcagcaacaacagcgaagaacgtttgctggcgagcgacgattaccaacaacagctggcagaagccatttacaaaggcctgcgcaattacttccttgcgcatccgatgcaatctgcgccgcagggtgcaacggcacaaactgccagtacggtgacgacgccagatcgcacgctgccaaactaaggacgattgatgccaattcaggtcttaccgccacaactggcgaaccagattgccgcaggtgaggtggtcgagcgacctgcgagcgtagtcaaagaactagtggaaaacagcctcgatgcaggtgcgacgcgtatcgatattgatatcgaacgcggtggggcgaaacttatccgcattcgtgataacggctgcggtatcaaaaaagatgagctggcgctggcgctggctcgtcatgccaccagtaaaatcgcctctctggacgatctcgaagccattatcagcctgggctttcgcggtgaggcgctggcgagtatcagtagcgtttcccgcctgacgctcactagtcgcaccgcagaacagcaggaagcctggcaggcctatgccgaagggcgcgatatgaacgtgacggtaaaaccggcggcgcatcctgtggggacgacgctggaggtgctggatctgttctacaacaccccggcgcggcgcaaattcctgcgcaccgagaaaaccgaatttaaccacattgatgagatcatccgccgcattgcgctggcgcgtttcgacgtcacgatcaacctgagccataacggtaaaattgtgcgtcagtaccgcgcagtgccggaaggcgggcaaaaagaacggcgcttaggcgcgatttgcggcaccgcttttcttgaacaagcgctggcgattgaatggcaacacggcgatctcacgctacgcggctgggtggccgatccaaatcacaccacgcccgcactggcagaaattcagtattgctacgtgaacggtcgcatgatgcgcgatcgcctgatcaatcacgcgatccgccaggcctgcgaagacaaactgggggccgatcagcaaccggcatttgtgttgtatctggagatcgacccacatcaggtggacgtcaacgtgcaccccgccaaacacgaagtgcgtttccatcagagccgtctggtgcatgattttatctatcagggcgtgctgagcgtgctacaacagcaactggaaacgccgctaccgctggacgatgaaccccaacctgcaccgcgttccattccggaaaaccgcgtggcggcggggcgcaatcactttgcagaaccggcagctcgtgagccggtagctccgcgctacactcctgcgccagcaagtggcagtcgtccggctgccccctggccgaatgcgcagccaggctaccagaaacagcaaggtgaagtgtatcgccagcttttgcaaacgcccgcgccgatgcaaaaattaaaagcgccggaaccgcaggaacctgcacttgcggcgaacagtcagagttttggtcgggtactgactatcgtccattccgactgtgcgttgctggagcgcgacggcaacattagtcttttatccttgccagtggcagaacgttggctgcgtcaggcacaattgacgccgggtgaagcgcccgtttgcgcccagccgctgctgattccgttgcggctaaaagtttctgccgaagaaaaaagcgcattagaaaaagcgcagtctgccctggcggaattgggtattgatttccagagtgatgcacagcatgtgaccatcagggcagtgcctttacccttacgccaacaaaatttacaaatcttgattcctgaactgataggctacctggcgaagcagtccgtattcgaacctggcaatattgcgcagtggattgcacgaaatctgatgagcgaacatgcgcagtggagtatggcacaggccataaccctgctggcggacgtggaacggttatgtccgcaacttgtgaaaacgccgccgggtggtctgttacaatctgttgatttacatccggcgataaaagccctgaaagatgagtgatatcagtaaggcgagcctgcctaaggcgatttttttgatggggccgacggcctccggtaaaacggcgttagccattgagctgcgtaaaattttaccagtagagttgataagcgttgattctgcccttatttacaaagggatggatatcgggacggcgaagccgaacgctgaagagttactcgccgcgccgcaccgattgctggatattcgcgatccgagccaggcttacagcgctgctgattttcgccgcgatgcgctggcggaaatggccgatatcaccgcggcggggcggatcccactgttagtgggcggtacgatgttgtatttcaaggcattgctggaagggttgagcccgctaccgagcgcagacccggaagtacgggccagaattgagcaacaggcggcagagcaaggttgggagagtttgcatcgtcaacttcaggaggtagatccggttgcggcagcaaggattcatccaaatgatccacaaaggctttcccgggcactggaagtttttttcattagcggtaaaactttaacggaactgacgcaaacgagtggagacgctctaccgtatcaggtgcatcagttcgccatcgccccggcgagccgtgaactgctccatcaacgcattgagcagcgttttcatcagatgttggctagtggttttgaagcagaagtccgggcgctttttgcccgaggagatttgcatacggacttgccttccattcgttgcgtgggttatcgccagatgtggtcttaccttgaaggcgaaatcagttacgatgaaatggtttatcgaggtgtttgcgccacgagacagttggcgaagcggcagataacctggctgcgtggttgggaaggggttcactggcttgacagtgaaaaaccagaacaggcgcgtgacgaagtattacaggttgttggtgctatcgcaggctgaatgtgtacaattgagacgtatcgtgcgcaattttttcagaatcgaaaggttcaaagtacaaataagcatataaggaaaagagagaatggctaaggggcaatctttacaagatccgttcctgaacgcactgcgtcgggaacgtgttccagtttctatttatttggtgaatggtattaagctgcaagggcaaatcgagtcttttgatcagttcgtgatcctgttgaaaaacacggtcagccagatggtttacaagcacgcgatttctactgttgtcccgtctcgcccggtttctcatcacagtaacaacgccggtggcggtaccagcagtaactaccatcatggtagcagcgcgcagaatacttccgcgcaacaggacagcgaagaaaccgaataaggtttcgggctgtttttttacacggggagccagcgatcctgcgttccccgctgatctatttagagggttatacgcttgtttgaccgttatgatgctggtgagcaggcggtactggtacacatctattttacgcaagacaaagatatggaagacctccaggagtttgaatctctggtctcttccgccggtgtcgaagcattgcaggtgattaccggtagccgtaaagcgccgcacccaaagtattttgtaggtgaaggtaaagcagttgaaattgcggaagctgtcaaagcgacgggtgctagcgtcgttctttttgaccatgccctgagcccggcgcaagagcgtaacctggagcgtttgtgcgagtgtcgtgttatcgaccgcaccggccttattttagatattttcgcccaacgtgcgcgtacccatgagggtaagttgcaggttgagctggcgcagctgcgccatctggctacgcgcctggtgcgtggctggacccaccttgaaagacagaaaggcgggataggtttgcgtggtccgggtgaaacccagctcgaaaccgaccgtcgtttgttgcgtaatcgcatcgtgcagatacagagccgcctggaaagagttgaaaagcagcgtgagcaggggcggcaaagccgtatcaaagccgacgttcctactgttagcctggtgggatataccaacgccggtaaatctacccttttcaatcgcatcaccgaagcgcgggtctacgcggcagaccagttgtttgccaccctcgacccgacgttgcggcgtattgacgttgcagatgtcggtgaaaccgtacttgcagataccgtagggtttattcgccacctgccgcacgatctggtggcggcatttaaagccacgttacaagagacgcggcaagccacattactgctgcacgtcattgatgcggcggatgtgcgtgtacaagaaaacatcgaagcggtgaatacggttcttgaagagatcgacgctcacgagatcccaaccctgctggtgatgaacaagatcgatatgctggaagatttcgaaccgcgtattgatcgggacgaagagaacaaaccgaaccgtgtctggctttccgcacagaccggagcggggataccacagctttttcaggctttgacggagcggctttccggcgaggtggcgcagcatacattgcgtctgccaccgcaggaagggcgtctgagaagtcgtttttatcagcttcaggcaatagaaaaagagtggatggaggaggacggcagcgtaagtctgcaagttcgtatgccgatcgttgactggcgtcgcctctgtaaacaagaaccggcgttgatcgattacctgatctaacggcgtagcgtctgaagcgtggagtcatatcctctggcgtcgaaagacaacagggatcaccgcataacaaatatggagcacaaacatggcgtggaatcagcccggtaataacggacaagaccgcgacccgtggggaagcagcaaacctggcggcaactctgagggaaatggaaacaaaggcggtcgcgatcaagggccacctgatttagatgatatcttccgcaaactgagcaaaaagctcggtggtctgggcggcggtaaaggcaccggatctggcggtggcagtagtagccaaggcccgcgcccgcagcttggcggtcgtgtcgttaccatcgcagcggcagcgattgtcattatctgggcggccagtggtttctataccattaaagaagccgaacgcggcgtggtaacacgctttggtaaattcagccatctggttgagccgggtctgaactggaaaccgacgtttatcgacgaagtcaaaccggtgaacgtggaagccgtgcgtgaactggccgcttctggtgtgatgctgacgagcgacgagaacgtagtgcgcgttgagatgaacgtgcagtaccgcgtcaccaatccggaaaaatatctgtatagcgtgaccagcccggatgacagcctgcgtcaggctaccgacagcgccctgcgtggagttatcggtaaatacaccatggaccgcattctgacggaaggtcgtaccgtgattcgtagcgatactcagcgcgaactggaagagacgattcgtccgtatgacatgggtatcacgctgctggacgtcaacttccaggctgctcgtccgccggaagaagtaaaagcggcgtttgacgatgcgattgccgcgcgtgaaaacgaacagcaatacattcgtgaagcagaagcgtataccaacgaagttcagccgcgtgcgaacggtcaggcgcaacgtatcctcgaagaggcgcgtgcgtacaaggcccagaccatcctggaagctcagggtgaagtggcgcgctttgctaaacttctgccggaatataaagccgcgccggaaattactcgcgagcgtctgtatatcgagacgatggaaaaagtgttgggtaacacccgcaaagtgctggttaacgataaaggtggcaacctgatggttctgccgttagaccagatgctgaaaggtggtaacgcccctgcggcgaagagcgataacggtgccagcaatctgctgcgtctgccgccagcctcttcctccacaaccagtggagcaagcaacacgagctccaccagtcagggcgatattatggaccaacgccgcgccaacgcgcagcgtaacgactaccagcgtcagggggaataacgatgcgtaagagtgttatcgcgattatcatcatcgtgctggtagtgctttacatgtctgtctttgtcgtcaaagaaggtgagcgcggtattacgctgcgttttggtaaggtactgcgtgacgatgacaacaaacctctggtttatgagccgggtctgcatttcaagataccgttcattgaaacggtgaaaatgctcgacgcacgtattcagaccatggacaaccaggccgaccgctttgtgaccaaagagaagaaagacctgatcgtcgactcttacatcaaatggcgcatcagcgatttcagccgttactacctggcaacgggtggtggcgacattagccaagcggaagtgctgttgaaacgtaagttctctgaccgtctgcgttctgaaattggtcgcctggacgtgaaagatatcgtcaccgattcccgtggtcgtctgaccctcgaagtacgtgacgcgctgaactccggttctgcgggtacagaagatgaagttactaccccggcggcagataacgccattgccgaagcggcagagcgcgtaacggctgagacgaagggcaaagttccggtcatcaacccgaacagtatggcggcgctgggtattgaagttgtcgatgtgcgtatcaagcagatcaacctgccgaccgaagtgtctgaagcgatctacaaccgtatgcgcgccgagcgtgaagcggtagcgcgtcgtcaccgtagtcaaggtcaggaagaagcggaaaaactgcgcgcgactgccgactatgaagtgaccagaacgctggcagaagctgagcgtcagggccgcatcatgcgtggtgaaggcgatgccgaagcagccaaactgtttgctgatgcattcagtaaagatccggacttctacgcattcatccgtagcctgcgtgcttatgagaacagcttctctggcaatcaggacgtgatggtcatgagcccggatagcgatttcttccgctacatgaagacgccgacttccgcaacgcgttaatataacgactgcggtacaggtcaataaagccaccgcatcctcagggatgtcggtggttttctttttctataaggataatgaatgaatagcacaatctggctggcgcttgccctggttttggtactggaaggtttagggccgatgctttacccgaaggcatggaagaagatgatctctgcgatgaccaatttgcccgataatattttacgtcgttttggcggtggacttgtggttgcgggcgttgtggtctactacatgttgaggaaaacgattggctgaacaaaaaacagactgatcgaggtcatttttgagtgcaaaaagtgctgtaactctgaaaaagcgatggtagaatccatttttaagcaaacggtgattttgaaaaatgggtaacaacgtcgtcgtactgggcacccaatggggtgacgaaggtaaaggtaagatcgtcgatcttctgactgaacgggctaaatatgttgtacgctaccagggcggtcacaacgcaggccatactctcgtaatcaacggtgaaaaaaccgttctccatcttattccaagtggtattctccgcgagaatgtaaccagcatcatcggtaacggtgttgtgctgtctccggccgcgctgatgaaagagatgaaagaactggaagaccgtggcatccccgttcgtgagcgtctgctgctgtctgaagcatgtccgctgatccttgattatcacgttgcgctggataacgcgcgtgagaaagcgcgtggcgcgaaagcgatcggcaccaccggtcgtggtatcgggcctgcttatgaagataaagtagcacgtcgcggtctgcgtgttggcgaccttttcgacaaagaaaccttcgctgaaaaactgaaagaagtgatggaatatcacaacttccagttggttaactactacaaagctgaagcggttgattaccagaaagttctggatgatacgatggctgttgccgacatcctgacttctatggtggttgacgtttctgacctgctcgaccaggcgcgtcagcgtggcgatttcgtcatgtttgaaggtgcgcagggtacgctgctggatatcgaccacggtacttatccgtacgtaacttcttccaacaccactgctggtggcgtggcgaccggttccggcctgggcccgcgttatgttgattacgttctgggtatcctcaaagcttactccactcgtgtaggtgcaggtccgttcccgaccgaactgtttgatgaaactggcgagttcctctgcaagcagggtaacgaattcggcgcaactacggggcgtcgtcgtcgtaccggctggctggacaccgttgccgttcgtcgtgcggtacagctgaactccctgtctggcttctgcctgactaaactggacgttctggatggcctgaaagaggttaaactctgcgtggcttaccgtatgccggatggtcgcgaagtgactaccactccgctggcagctgacgactggaaaggtgtagagccgatttacgaaaccatgccgggctggtctgaatccaccttcggcgtgaaagatcgtagcggcctgccgcaggcggcgctgaactatatcaagcgtattgaagagctgactggtgtgccgatcgatatcatctctaccggtccggatcgtactgaaaccatgattctgcgcgacccgttcgacgcgtaattctggtacgcctggcagatattttgcctgccgggcgaacagtgtgatacattgctgtgtcgggtaagccattacgctatccgacacagtgttaaatcctcgcttttttccttccccgaactgaaataaattagcgacacagcttgtggctggtttatcatcaatataaatgtattttttcccgatttcccttttgaggttgatgtgcagttaacgagtttcactgattacggattacgtgcgctgatctacatggcgagtttgccagaagggcggatgaccagtatttctgaagtgactgacgtctacggcgtctcccgtaatcatatggtcaaaataatcaatcaacttagtcgtgccggctacgtgactgctgttcgtggaaaaaatggcggcattcgcctgggtaaaccggcgagtgcgatacgtattggtgatgtggtgcgcgagctggagcccttaagcctggtgaattgcagcagtgagttttgccacattacacctgcctgtaggttgaaacaggcactttctaaggccgtgcaaagttttcttacggaactggataactacacgcttgccgatttggttgaagagaatcaaccgctttataaattattgctggtggagtgacgaaaatcttcatcagagatgacaacggaggaaccgagatgagtcaagatcctttccaggaacgcgaagctgaaaaatacgcgaatcccatccctagtcgggaatttatcctcgaacatttaaccaaacgtgaaaaaccggccagccgtgatgagctggcggtagaactgcacattgaaggcgaagagcagcttgaaggcctgcgtcgccgcctgcgcgcgatggagcgcgatggtcaactggtcttcactcgtcgtcagtgctatgcgctgccggaacgcctcgacctggtgaaaggtaccgttattggccaccgtgatggctacggctttctgcgggttgaagggcgtaaagatgatttgtatctctccagcgagcagatgaaaacctgcattcatggcgatcaggtgctggctcagccgctgggtgctgaccgtaaaggtcgtcgtgaagcgcgtattgtccgcgtactggtgccaaaaaccagccagattgttggtcgctactttaccgaagcgggcgtcggctttgtggttcctgacgacagccgtctgagcttcgatatcttaatcccgcccgatcagatcatgggcgcgcggatgggctttgtggtcgtagtcgaactgactcagcgtccgactcgccgcaccaaagcggtgggtaaaatcgtcgaagtgctgggcgacaatatgggcaccggcatggcggttgatatcgctctgcgtacccatgaaattccgtacatctggccgcaggctgttgagcaacaggttgccgggctgaaagaagaagtgccggaagaagcaaaagcgggccgtgttgatctgcgcgatttaccgctggtcaccattgatggcgaagacgcccgtgactttgacgatgcagtttactgcgagaaaaaacgcggcggcggctggcgtttatgggtcgcgattgccgacgtcagctactatgtgcgtccgagtacgccgctggacagagaagcgcgtaaccgtggcacgagcgtgtacttccctagccaggttatcccgatgctgccggaagtgctctctaacggcctgtgtagcctcaacccgcaggtagaccgcctgtgtatggtgtgcgagatgacggttagcagcaaaggccgcctgacgggctacaaattctacgaagcggtgatgagctctcacgcgcgtctgacctacaccaaagtctggcatattctgcagggcgatcaggatctgcgcgagcagtacgccccgctggttaagcatctcgaagagttgcataacctctataaagtgctggataaagcccgtgaagaacgcggtgggatcagttttgagagcgaagaagcgaagttcattttcaacgctgaacgccgtattgaacgtatcgaacagacccagcgtaacgacgcgcacaaattaattgaagagtgcatgattctggcgaatatcagcgcggcgcgtttcgttgagaaagcgaaagaaccggcactgttccgtattcacgacaagccgagcaccgaagcgattacctctttccgtagtgtgctggcggagctggggctggaactgccgggcggtaacaagccggaaccgcgtgactacgcggagctgctggagagcgttgccgatcgtcctgatgcagaaatgctgcaaaccatgctgctgcgcagcatgaaacaggcgatttacgatccagaaaaccgtggtcactttggcctggcattgcagtcctatgcgcactttactagcccgattcgtcgttatccagacctgacgctgcaccgcgccattaaatatctgctggcgaaagagcaggggcatcagggcaacaccactgaaaccggcggctaccattatagcatggaagagatgctgcaactgggtcagcactgtagcatggcggaacgtcgtgccgacgaagcaacgcgcgatgtggctgactggctgaagtgtgacttcatgctcgaccaggtaggtaacgtctttaaaggcgtaatttccagcgtcactggctttggcttcttcgtccgtctggacgacttgttcattgatggtctggtccatgtctctagcctggacaatgactactatcgctttgaccaggtagggcaacgcctgatgggggaatccagcggccagacttatcgcctgggcgatcgcgtggaagttcgcgtcgaagcggttaatatggacgagcgcaaaatcgactttagcctgatctccagcgaacgcgcaccgcgcaacgtcggtaaaacggcgcgcgagaaagcgaaaaaaggcgatgcaggtaaaaaaggcggcaagcgtcgtcaggtcggtaaaaaggtaaactttgagccagacagcgccttccgcggtgagaaaaaaacgaagccgaaagcggcgaagaaagacgcgagaaaagcgaaaaagccaagcgcgaaaacgcagaaaatagctgcagcgaccaaagcgaagcgtgcggcgaagaaaaaagtggcagagtgatcaataccctctttaaaagaagagggttagattgctgacaaaatgcgctttgttcatgccggatgcggcgtgaacgccttatccggcctacataatcacgcaaattcaatatattgcagagatcatgtaggccggataaacgtagtgcatcaggcaaaacgtaaacaacgagtacattaatgagcgaaatgatttacggcatccacgcagtgcaggccctgctggagcgcgcccctgaacgttttcaggaagtctttattttaaaaggccgtgaagataaacgtctgttaccgctgattcacgcccttgagtctcagggcgtggttatccagttggcaaaccgccaatatctcgacgagaaaagcgacggtgccgtgcatcagggcattatcgcccgcgtgaagccaggacgtcagtatcaggaaaacgatctgccggatctgatcgctagcctcgatcaaccgttcctgctgatcctcgacggcgtaaccgatccgcacaacctcggcgcgtgcctgcgtagtgcggacgccgcaggcgttcatgcggtgattgtgccgaaagatcgctccgcacagctcaacgctacggcgaaaaaagtagcctgcggcgcggcagaaagcgttccgctgattcgggtgactaaccttgcgcgcaccatgcgtatgttgcaggaagagaatatctggatcgtcggtacggcaggcgaggcggatcatacactctatcagagcaaaatgaccggacgcctggcgctggtgatgggtgcggaaggtgaaggtatgcgtcgcctgactcgtgaacattgcgatgagttgatcagcatcccgatggctggaagcgtttcttccctgaacgttagcgttgcgaccggaatttgcttatttgaagcggtgcgccagcgcagctaatttctcagaattatgaaaagccatccagatttggatggtttttttttgtctatagctggtaagataattacgtattgcaaatattcattttattaatatttaaacttaatctatatggaataatatatgacatggaatccgttggcgctagcgacggcgctgcaaactgtacctgaacaaaatattgatgtaacaaatagcgagaacgcattaattattaaaatgaatgattatggcgatttgcaaatcaatattctttttacttcccgccaaatgattatcgaaacctttatttgtccggtgagtagtatcagcaatccagatgaatttaataccttcttattaagaaatcagaagatgatgccgttgagtagcgtagggatctccagcgtacaacaggaagagtattacattgttttcggggcgttaagccttaaatcttctcttgaagatatcctgcttgagataaccagcctggtagataacgcattggatctggctgaaattacagaagaatatagtcactaattacaaggacgggtatttatgggaattttaaaaagtttatttacgctggggaaaagctttatctcccaggcggaagaatccattgaagaaacccagggcgtgcgcatgctggaacagcatattcgtgacgctaaagctgaactcgataaagccggaaaatctcgcgttgatctgctggcgcgggtgaaattaagtcacgataagctgaaagatttacgtgagcgcaaagccagtctggaagcccgtgcgctggaagcgttaagcaagaacgttaatccgagcttgattaacgaagttgctgaagaaatcgcgcgccttgagaatctcattaccgctgaagagcaagtgttgagcaatctggaagtctcccgtgatggcgtggaaaaagcagttacagcgacagcgcagcgtatcgctcagtttgagcagcaaatggaagtcgttaaagccactgaagccatgcagcgtgcacaacaggctgtaacaacctctaccgttggcgcatcttccagcgttagcacagcggcagaatccttaaaacgcctgcaaacgcgtcaggccgaacgtcaggctcgcctggatgctgccgcacagttggagaaagtcgcagacggtcgcgaccttgacgaaaagctggcggaagccggaattggcggtagcaataaaagtagcgcccaggatgtattagcaagactgcaacgccaacagggcgagtaatttttttgccagcctcgctaaaaggctggcaactattttaaggataaaatatgtctggttttttccagcgtctgtttggcaaggataataagccagctatcgctcgtggtccgctgggacttcatctcaatagtggctttacgctcgacacgttagcgtttcgtttgctggaagatgaattgctgattgcgctgccgggtgaggaatttacggtagccgccgtcagccacatcgatctgggcggcggtagtcagattttccgctactacactagtggcgatgagtttctgcaaatcaataccaccggcggcgaagatattgatgacattgatgatatcaagctctttgtctatgaagagagctacggtatcagtaaagagagtcactggcgcgaggcgatcaacgccaaagcgatgggagcaatgaccttaaactggcaggaaaaacgctggcagcgattttttaacagcgaagaaccgggaaatatcgaacccgtctacatgctggaaaaagtagaaaatcaaaaccatgccaaatgggaggtccataattttaccatgggctaccaacggcaagtaaccgaagatacttacgaatatttgctgctaaatggtgaggaatcttttaacgatctcggcgagccagagtggttatttagccgcgcgttgggtgtcgatatcccgctgacaagtcttcatattattggttaattacaaggacgtttacaatgcatatactggatagtcttcttgcctttagcgcctatttttttattggcgtggctatggtgattatttttctgtttatctattctaaaattacaccgcacaacgaatggcagttaatcaaaaacaataataccgcggcgagtctggcgttcagcggtacattgttgggttacgttatccccttatccagtgcggcaatcaatgcggtgagtattccagactatttcgcctggggcgggattgcactggtgattcagttactcgtttttgctggtgtcagactttatatgcccgcattaagcgaaaaaattattaatcacaataccgcagcaggaatgtttatgggaaccgccgcgctggctggcggtatttttaacgcagcttgtatgacatggtaatggacgatcatggccagaaaacgcaaaagtagaaataacagtaaaattggtcacggagcgattagtcgcattggtagaccgaataatccttttgaaccgtgccgcaatcgctacgcacaaaaatacttaacgttggcgctaatgggcggtgccgcttttttcgtattgaaaggttgtagcgatagtagcgatgtcgataacgacggcgacggaacgttttacgcgacagtgcaggattgtattgatgacggtaataatgccgacatttgcgcgcgtggctggaacaacgccaaaacggcattttatgccgatgttccgaagaatatgactcagcagaactgtcagtctaagtacgaaaattgctactacgacaatgttgaacagagttggatcccggtcgtttctggatttttgttaagccgggttattcgtaaagatcgcgatgagccgtttgtttataacagcggcggttcctcttttgctagccgcccagtctggcgcagcacttctggtgattactcctggcgctccggttctggcaaaaaagagtcttactctagcggcggctttaccaccaaaaaagcgtctaccgtttctcgcggcggctatggtcgttcttccagcgcccgtgggcattggggaggctaatcatgctgagacacaacgttcctgtgcgacgggatctggaccagatcgccgctgacaacggtttcgactttcatatcatcgacaatgaaatctattgggatgagagtcgggcttaccgttttactctgcgccagattgaagagcagatcgaaaaaccgactgcggaactgcatcagatgtgccttgaggtggtggatcgcgcggtaaaagatgaagagatcctgacgcaactggcgatcccgccgttgtactgggatgtgatcgctgaaagctggcgcgcccgcgatcctagcctgtatggacggatggattttgcctggtgtggcaatgcgccggtgaagctgctggagtacaacgccgatacgccaactagtttgtacgagagcgcttatttccagtggctgtggctggaggatgcccggcgcagcggcattattccgcgtgatgccgatcagtacaatgctattcaggaacgcctgattagtcgctttagcgagctttacagtcgggaaccgttttatttttgctgctgtcaggacaccgatgaagacaggagtaccgtgctgtacttgcaggactgcgcccagcaggcagggcaggagagccggtttatctacattgaagatctcggtttgggcgtcggcggcgtactgaccgatcttgatgataatgtcatccagcgtgcatttaagctgtatccgctggagtggatgatgcgtgacgataacggtccgctgctgcgcaagcgtcgcgagcaatgggtggagccgttatggaaaagtatcttgagtaataaagggctaatgccgctgctttggcgcttcttccctggtcatcctaatcttcttgcgtcctggttcgatggcgagaaaccgcagattgccgctggcgaaagctatgtgcgtaaaccaatctatagccgcgaaggcggcaacgtcaccatttttgacggcaagaataacgttgttgaccacgctgatggtgattacgccgatgaaccgatgatctaccaggcgtttcaacctctgccgcggtttggcgatagctacacactcatcggtagctggattgtcgatgatgaagcgtgcggaatggggatccgtgaagataacacactgatcaccaaagacaccagtcgtttcgttccgcattacattgctggataagaatgttttagcaatctctttctgtcatgaatccatggcagtgaccatactaatggtgactgccattgatggagggagacacagtgcactggcaaactcacaccgtttttaatcaacctataccattaaataacagcaacttatacctgtctgatggcgcgctctgcgaagcggtaacgcgtgaaggtgctggctgggatagcgattttctagccagtattggtcagcagttaggaacggctgaatcccttgaactggggcggctggcgaatgtgaatccgcctgaattattgcgctacgatgcgcaaggacgccgtctggacgatgtgcgttttcaccccgcctggcacctgctgatgcaggcgctatgtaccaatcgggtgcacaatcttgcctgggaagaagacgctcgctccggcgcatttgtggcgcgcgcggcgcgttttatgttacatgcgcaggttgaggcagggagcttatgtccgataaccatgacctttgccgccacgccattgttgttacagatgttacccgcgccgtttcaggactggaccacgccgctattgagcgatcgctacgattctcacttattgccaggtgggcaaaaacgcggtttgttgattggcatgggaatgacggaaaagcagggcggttccgatgttatgagcaacaccacccgtgcagagcgtctggaagatggctcttatcggctggtggggcataaatggtttttcagcgttccgcaaagcgatgcgcatctggtgctggcgcagaccgcgggtggtctgtcctgcttttttgtgccgcgctttttgcctgacgggcaacgcaacgcgattcgcctcgagcggctgaaagataagctgggtaatcgctctaacgccagttgcgaagtggagtttcaggatgccattggttggttgttggggctggaaggggaaggaattcgtctgatcctgaaaatgggtgggatgacgcgttttgattgcgccctgggtagccatgccatgatgcgccgtgcatttagcctggcgatttatcatgcacatcaacgccatgtttttggtaatccattgatccaacagccccttatgcgtcatgtcttaagtcgcatggcacttcagcttgaagggcaaacggcgttgctgtttcgtcttgcgcgagcgtgggaccggcgtgccgatgccaaagaagccctgtgggcgcgtttatttacgcctgcggcaaaatttgtgatctgcaaaagaggtatgccgtttgtggccgaagcgatggaggtgctgggcggcattggttattgcgaggagagtgagctgccgcggctttaccgggagatgccggtaaacagtatttgggaaggttccggcaatattatgtgcctggatgtgttgcgcgttctcaataagcaagcgggcgtatacgacttattgagcgaagcatttgtggaagtgaaagggcaggatcgctattttgatcgcgcggttcgtcgtttacagcagcagctgcgtaagccagctgaagaactggggcgagagattactcatcagctattcctgctgggctgcggtgcgcaaatgttgaaatatgcttctccgccaatggcgcaggcgtggtgtcaggtgatgttagatacgcgcggcggcgtacggttgagtgagcagatccagaatgatttattgctgcgggcgacggggggagtgtgtgtgtaagcgtatacgactgatgcgacgctggtttcgattaactaaatgaaatatgtgaaaattgtaggccggacaaggcgctcgcgccgcatccggcattgttcatttgctgtagatgacactcatgcatacagtatcgcctgtacgcgccagttatcaggctgctggtcttcgtacatggtaataatgcggtaccaactcgcaccttgttcatcggcctttaacgccacgatacgttccacgtcctgcggatccccactaatattgctaacactgatctgacctatttcattcaggcccgtcacgcagtcagcactggcgaattctgcagactgtgccgtggcgctcgcaggataagtcactaattgcaggctgggactggcaagtaattgtttcatcgtcagctccatttttcgtttccccacatgttgcagggcattccatcgcggtaataaacgcccaggcttccagccggtaatttattgtgcacaggtaaacgcatagggacgcaaagcaatgtaaagctgactatgtaagttgtctgatttatttacggtacaaaatggcttgactataccactgtcctgtcacgatggtttcgtccaccatgacgacaacgtaataatcagcttttgcagcgacagctttcgctttgatttctgctaatgcgtcatccggagaaccccgaaccatcgtgcttacgctacctattcgctgtaacccttgcgtctggtcgcggcgaatctcttgcggatggtccgttactggcggtgctggctgtggcgtaccttgcagtgcgctacaggcacttaacatcaacaccaataataaactggcaaaccggtaaataacgctattacgtttcctgctaaccatagtgtagtgccttattaatttaactttgggggaatgttcccgaattgttacctggtacgcgattttcgaatgaaaacgtgacgaaagcgtaacccacatctcaacattatgaactaataccgccagcagaaacttgtgctaaggatttcttcatgtcataccagacaaaaaggagagacagatgattgaaatagaaagtcgcgagctggcagatattcccgttcttcatgcttatcctgtcgggcaaaaagataccccgttaccgtgcgtaattttttatcacggctttactagttccagtctggtgtatagctattttgccgttgcgctggcgcaggctggtttgcgggtgatcatgccggatgcgcccgatcacggtagccgttttagtggtgacgcagcgcggcggttaaatcaattctggcaaatcttgctacaaagtatgcaggaattcactactttacgtgcggcaatagccgaagaaaactggctgcttgatgaccgtctggcagtcggtggcgcgagcatgggcgcgatgacggcactggggattaccgctcgccaccccacggtgagatgtaccgccagcatgatgggaagcggctattttacaagtctcgcccgtagtctgtttccaccgctgatacctgaaacggcagcacagcagaatgaattcaataacattgtcgcgccactggcagagtgggaagcgacaaaccacctggaacaacttagtgacagacctctactgctgtggcatggcctcgacgatgacgttgtgcctgccgacgaaagtctacgtttgcagcaggccttaagcgagacgggacgggataaactgctaacctgtagttggcagccaggcgtgcgtcaccgcattacgcctgaggcgttagatgctgccgtgacatttttccgccagcatctttaaacacgcagaatgctgaccccttgcgcttccagttgttgcaggatttccgggttagcatttttgccggtgataagcatatcgatttgatcggcacggctaaaaagcattcccgcgcgttcgccaatcttactgctatcaaccagtaccaccagtttccctaccacgctcagcatcttctgctctgccattgctgtcagcatatcggttttatacaacccttctgcggtcagcccttttccgctggtaaacatccagtgcccggcatagagactgttttcgctgccctgcgggcttaaagtgatggactgacttttgttgtactgtccgcccataatgatcacgctgtcatgttcttgatcgatcaggtaatttgccagcggtagataattagtgatgatttgcactggcttgccacacatttcccgcccaagcagaaacgcggtggagccgcagttgatgactacgctttcgcccggattaaccagctggctggccgctttagcgatacgtactttttcatcgtgattctgcgcctgatgcagattcatcggcgtccagcgcgggcgctgttgggtaatagcttctgcgccattgcgcacttttttcagtttgccgctttcgtcaagtttattgatatcgcgtcgcgcagtggcagggctaattcccagacgctcaacgactttctcaacggtcacaaagcccaattgtgcgagcatttccaggaggatttgatgtctttgtgcttcagtcatgagctattccgataaaatttgatttttttagatgatatttgaaatagccaggaaatactacgccggatagcgcgaacttctccacgctacccggtataaacgacagattacaggaaactcttgaacggcagatccggttcaatagtgaagcaatcatcgaaaccgcgcggatagtggtactcgaagttgtctttatccagcggccaggtaaatttgccacccacctgccagataaacggcttgaagccatacttcaggcgatcttttttcatctcccacagcacgcggatctcttgcggatcggcctggaagttactccagatatcgtggtggaacgggatcactactttcgcattcagcgcttcacccatacgcagcatatcggcgctggtcattttgtcggtgataccgcgcgggttttcgccgtagcttcctaacgccacgtcgatctgatgttcgttaccgtgcttcgcataatagttagagtagtgggagtcgccgctgtgatacagggagccgccaggcgttttgaacaggtagttcaccgcgcgatcgtccatgccatctggcagtacgccagccgctttttgatcggcaggcagggtgatcagtgcagtacggtcgaaagcatcaagcgcatgaatttcaatgtctttcacttttactacatcgcccggtttgaccacgatgcaacgctctttcggtacgccccagccaatccacaaatccacacaggttttcggtccgataaacggtacgtcatctgcacaattctgcatcacggcagcagcgacgttaacgtcgatatgatcgttgtgatcgtgagtcgccagtaccgcgtcgatctggcgaatcgcaaacggatcaagaacaaacggggtggtacgcaggtttggctgcagttttttcacgccagccatgcgctgcatctggtgaccctgtttcattaacgggttaccgtgactttgtttgccagtgccgcaccagaaatcaacgcaaacgttggtgccaccttcgcttttcaaccagatcccggtgcagccaagccaccacatcgcaaatgtgccaggagcgacctgttcttgttcaatttcttcattcaaccagctaccccactccgggaaagtgctcaggatccaggattcacgggtgatacttttcactttactcatcgccatttaccttcatgatagttcaattcgaatcaatatgtgattggttttgattaatcctgacactattttttcaggaaggcaatgaccattttttgactttttgccagggaagttgttgttgattttgagtatggaaagatttaatggaatgtgtaattcaattaactaaatgaatttaaatggataattgtttcgttgtgtgaatcccactctatccatgtggaattatttgcgggtcgcgtcacatttaatcataaataatcttgttgtgattacttttgaaaattagagtgagtgcacaacattccgggtgtgtggaatacccggttacctcttcttcaggagatcgttatggagatcctctacaacatctttaccgtgttttttaaccaggtcatgaccaatgccccgttgttgctgggtattgtgacctgtctgggctacatcctactgcgcaaaagtgtcagcgttattattaaaggcacgattaaaaccataattggtttcatgttgttgcaggcagggtccggcatcctcaccagcaccttcaaaccggtggtggcgaaaatgtccgaagtctacggcattaacggcgcaatttccgatacctacgctagtatgatggcaaccatcgaccgcatgggcgatgcctatagctgggtgggttacgccgtattgttagcgctggcgctgaacatctgttacgtgctgttgcgtcgcattaccggcattcgcacaatcatgttgaccggccacatcatgttccagcaggccgggttgattgccgttacgctgtttatcttcggctactccatgtggaccaccattatctgtaccgcgattctggttagcctctactggggcatcacttccaacatgatgtacaagccgactcaggaagtgacggatggctgtggtttctccatcggtcaccagcagcagtttgcaagttggattgcctataaagtcgcgccgttcctcggcaaaaaagaggagagcgttgaagacctcaaattgccgggctggctgaacattttccacgacaacatcgtctccacggcgattgtgatgaccatcttctttggtgccattctgctctccttcggtatcgacaccgtgcaggcgatggcaggcaaagtgcactggacggtgtacatcctgcaaactggtttctcctttgcggtggcgatcttcatcatcacgcagggtgtgcgcatgtttgtggcggaactctctgaagcatttaacggcatttcccagcgcctgatcccaggtgcggttctggcgattgactgtgcagctatctatagcttcgcgccgaacgccgtggtctggggctttatgtggggcaccatcggtcagctgattgcggttggcatcctggtcgcctgcggctccagcatcctgattattcctggctttatcccgatgttcttctctaacgccaccatcggcgtgttcgctaaccacttcggcggctggcgtgcggcgctgaagatttgtctggtgatggggatgatcgaaatctttggttgcgtctgggcggtgaaactcaccggtatgagtgcctggatgggcatggcggactggagcattctggcaccgccgatgatgcaaggcttcttctccatcggtatcgcctttatggccgtcatcattgtaattgcactggcttatatgttcttcgctggccgcgcgctgcgcgcagaagaagatgcagaaaaacaactggcagaacagtctgcttaataaggagttttgattatgaccgtacgtattctggctgtgtgtggcaacggacaaggcagttccatgatcatgaagatgaaagtggaccagtttttaacccaaagtaacattgaccatacggtaaacagctgcgcggttggcgagtacaaaagcgagttgagtggcgcggatatcatcatcgcttctacgcacattgcgggcgaaatcaccgtgaccggcaacaaatacgtggttggcgtgcgcaacatgctctctcctgccgactttggcccgaaactgctggaagtgatcaaagagcatttcccgcaggatgtgaagtaaggacgcgccatgaaattacgtgatagcctggcggaaaataaatccatccgcctgcaggctgaagcagagacatggcaggaagcggtgaaaatcggcgttgacctgctggtggcggcagatgtggtagagccgcgttactaccaggcgattctggatggcgttgaacagttcggtccttatttcgttatcgctccgggcctggcaatgccgcacgggcgtccggaagagggcgttaagaaaaccggtttctctctggtaacgctgaaaaagccgctggagttcaaccacgatgacaacgatccggtggatatcctcatcaccatggcggcggtcgatgccaatactcaccaggaagtgggcatcatgcagatcgtcaacctgtttgaagatgaagagaattttgaccgtttacgcgcctgccgtaccgagcaggaagtactggatctcattgaccgcaccaacgcggcagcttaagaaggaattgaacatgagtttaccgatgttgcaagtcgcgctggacaaccagactatggatagcgcctacgaaaccactcgcctgattgccgaagaagtcgacattatcgaagtgggcaccattctgtgcgtgggcgaaggcgtgcgtgcggttcgtgacctgaaagcgctctacccgcacaaaatcgtactggcagacgccaaaattgccgatgcaggcaaaatccttagccgtatgtgcttcgaagccaacgctgactgggtgacggtaatttgctgtgcggatatcaacaccgccaaaggcgcgctggacgtggcaaaagagtttaacggcgacgtgcagatcgaactgaccggttactggacctgggaacaggcgcaacagtggcgcgatgcaggcattgggcaggtggtttatcaccgcagccgtgacgcgcaggccgcaggcgtggcgtggggcgaagcggacatcaccgcgatcaaacgtctttccgatatgggcttcaaagtcaccgtcaccggaggcctggcgctggaagatctgccgctgttcaagggtattccgattcacgtctttatcgcgggccgtagtatccgtgatgccgcttctccggtggaagccgcacgtcagttcaaacgttccatcgctgaactgtggggctaaggagcggatatgttgtccaaacaaatcccgcttggcatctatgaaaaagcgctccccgccggggagtgctggctggaacgcctgcaactggcaaaaacgttaggcttcgattttgtcgaaatgagcgtagatgaaactgacgatcgcctgagccgcctcaactggagccgcgagcagcgtctggcgctggtcaatgcgattgttgaaaccggcgtgcgcgtgccgtccatgtgcctttctgctcatcgtcgtttcccgctgggcagtgaagatgacgcggtgcgggcgcaggggctggagattatgcgtaaagctatccagttcgcccaggatgtcggtattcgcgtgatccagctggcgggctatgacgtttactatcaggaagccaataacgaaacgcgtcgtcgtttccgtgacggcctgaaagagagcgttgagatggcaagccgcgcgcaggtgacgctggcgatggagatcatggattatccgttgatgagctccatcagcaaggcgctgggatacgcgcactatctcaacaatccgtggttccagctctacccggatatcggcaacctgagcgcgtgggacaacgatgtgcagatggagttgcaggccggaatcgggcatatcgtcgcggtacatgtgaaagacaccaaacctggcgtcttcaaaaacgtgccgtttggcgaaggtgtagtggatttcgaacgttgtttcgaaacgctcaaacagagtggctattgcgggccgtacctgattgagatgtggagcgaaacggcggaagacccggcggcagaagtggcgaaagcgcgtgattgggtgaaagcgcgcatggcgaaagcgggcatggtggaggcggcataatgcaaaagctaaaacagcaggtatttgaagccaacatggagctgccgcgctacgggctggtgacctttacctggggcaacgtcagcgctatcgaccgcgaacgcgggctggtggtgatcaagcccagcggcgttgcctacgaaaccatgaaagcggccgatatggtggtggttgatatgagcggcaaggtggtggaaggggagtatcgcccatcttccgacactgcgacgcatctcgaactctaccgtcgttacccgagccttggtggcattgtccatacccactccactcatgccaccgcatgggcgcaggcggggctggcgatcccggcgttaggcaccacgcacgccgactacttctttggcgacattccgtgtacgcgcgggttaagcgaagaagaggtgcagggcgagtatgaactgaacaccggcaaagtgattatcgaaacgctgggcaacgccgagccgctgcatacgccgggaattgtggtgtatcagcacgggccgttcgcctgggggaaagatgctcacgatgcggtgcataacgcggtggtgatggaagaagtggcgaaaatggcgtggattgcccgcggcattaacccacaactcaatcacatcgacagcttcctgatgaataaacacttcatgcgtaaacacggtcctaacgcttattacgggcagaagtaaaacacgcgctgcggaaatttccttcctcgggagataactggtctaattccgcagccgtttttcaaaaaaaagccccctgcgaagggggcaaagcaaactatggcaatgtttcgttggttatacctggtgttagcgataaatatccgcgctggcgtgcatattgccgttactccccggttcccgcatcagaattacgtggtagtacgttgcgccttgcgcatctgtttcttcatttaatgcctgacgtgcttcgctttcagtggcgaaattatgattgatataaatcacgcctaagctttgcacatcgtccatatttctggcctggtggttattaatttcaatggctgcccatgtatttgcacttagcaaaagcacagccagaagggctaaaacacgactgaacatagatacctcctcgacggctgactttgtgtgctctcctctgtgatgatcttctgatttaattttaatcaatgataaagaagttgatggtgaccatttctgatgcagttgttcaaaaaaacaccatgatgaagtgtgatgaacttcaaatcagcgtgttagaggttaattgcgaaaggggagatttatttcggctctgcccttgagtttagcgaggcatacaagtactataacgcgtcatttttcagccgacctttaacacgttccttgcctccccgggattcggctgacccagacaggaggctgaataatccgtaaggagcaattcgatgcgtcattacgaaatcgtttttatggtccatcctgaccagagcgaacaggttccgggcatgatcgagcgctacactgctgccatcactggtgcagaaggcaagatccaccgtctggaagactggggccgccgtcagctggcttacccgatcaacaaactgcacaaagcacactacgttctgatgaatgttgaagctccgcaggaagtgatcgatgagctggaaactaccttccgcttcaacgatgccgttatccgcagcatggttatgcgtaccaagcacgctgttaccgaagcatctccgatggttaaagcgaaagacgagcgccgtgagcgtcgcgatgatttcgcaaacgaaaccgctgatgatgctgaagctggggattctgaagagtaatttctgatgaccaaccgtctggtgttgtccggcaccgtgtgcagggctccccttcgaaaggtcagtccaagtggaattcctcactgccagttcgtgcttgagcatcgttctgtgcaggaggaagccggctttcaccggcaggcgtggtgtcaaatgcccgttattgttagcggacacgaaaaccaggccattactcacagtataacggtcggcagtcgcataaccgttcaggggttcattagttgccacaaggcaaagaacggactgagcaaaatggttttgcatgccgagcagattgaattgatagattctggagactaaccatatggcacgttatttccgtcgtcgcaagttctgccgtttcaccgcggaaggcgttcaagagatcgactataaagatatcgctacgctgaaaaactacatcaccgaaagcggtaagattgtcccaagccgtatcaccggtacccgtgcaaaataccagcgtcagctggctcgcgctatcaaacgcgctcgctacctgtccctgctgccgtacactgatcgccatcagtaatcggtcacggtccattaatacgactttgagaggataaggtaatgcaagttattctgcttgataaagtagcaaacctgggtagcctgggtgatcaggtaaacgttaaagcgggctatgctcgtaacttcctggtaccgcagggtaaagctgttccagctaccaagaaaaacattgaattcttcgaagctcgtcgcgctgaactggaagctaaactggctgaagttctggcagctgctaatgctcgcgctgagaaaatcaatgcactggaaactgttaccatcgcgtctaaagctggcgacgaaggtaaactgttcggttccatcggtactcgcgacatcgctgacgctgtaactgcagctggcgttgaagtggctaagagcgaagttcgtctgccgaacggcgttctgcgtaccactggcgaacacgaagtgagcttccaggttcacagcgaagtattcgcgaaagtgatcgtaaacgtagtagctgaataattcgttattcaacgagacgtaaaaacgccgaccattggtcggcgttttgctttctatttttcgtcaggtattagtttcgcaagtagatccattcaccattctcttgtgtccataagtcaggatggtttgctggcgttagatacatacgagcgcaactgatgtctcgctcctgcggcactcgctcgaaacccaaaccgctgtagattgcggcactactacttaaggaacgcagaccaattttcaaatcatggggtaaatcagaatacgcgtttagcaatgcagcaatgatgaatccgagggcattagaaacgcctgtaacagtgcgaagttggtcgatataaagatcgattgttggtagttcagaactccagcaattaggcatttgggcaggaagggttacaacgtatcctatcgtttggccggtatagtctggagtaccataaccaggtcccaaaaccacttcgtgtattgtgtatttactgttgggttcgaaggattcgacatcttgcaataaatatttcagttctgcggttaacctcgcacccgcgtaagctttattgtatttctgggcgtgaatattatctaatgtagcttcatggttccatccaaaagaattatcaccattcattgtgattccatcgtaagcattacacctcgtcgctaacttattgaatgcttgccagtcactgagatctagtttgtggatctcaacagtacgtctgccatcgcaattatgatctcttccacgattactaagtaatgtagcgcgtgcgtattgatgaaattttaattttactggtttgtcggtggagctaaaacgagataaatatgcaggaaaactataaatagtcgttggtaatgtcattgtaatgttacctgtttaatgtttttataaatatcgcagctgaatgttcacagaaaaaaatcgatattaataaaaataagtttgttttctgaagtggtgaaaatagcggatggtgaaagatattaatatcaaaaatcgctcattatggatataacgatgcacccggggagaaaatgacttccacgccttacaccgtacattcttgttgtgcggtatgtaattattctacgctgtcggtatcggtgtattcgttaatcagcaggttagccagccacaaaaagccattgagaaaattattgattttacatgggattattatattgctaatccttggtttttaaaaattgtgcatagtgaaaatcaaagtaaaggtgtgcattatgcaaaaagtcagcgtctcttagaaattaaccatgcgcacttgcagttaatggaatccttattggatgaagggaagaaacacaatatttttaagccagatatcgacccattgcaggtgaatattaatattgctgcgcttggcggatattatttgatcaaccagcatacgcttggcctggtttatcacatcagtatggttagtccccaggcactggaagccagacgtaaggtcatcaaagagacaatccttagctggcttttggttgaccctagttctaccgcgcacgaataattaccgcgcacgaataaaactgccatccggctggcgggtgaacaggacctgttgattattccccgtatcaatggttaagcccgtcaccacgccgctggcgttctggcggattttcaccatctgcccgttttgcaaattactcagcggcttacccgcgccttctacctgcgccattgcatagacatcggtagcgggcagtccgtggtcgcggaacagctgcgccatcgttttaccgggttcgacacggtaagagcgccattgattatcaattccgctatctggctggaatggttgcgtttgggtagtttgcggctgctcttctggctggccttcctgtataggttctggagcgaccggagccacctgatcaggaccattttgtggggtaactaattgcgcccgcagctgttcttctgtcggcggttgactttggctctgaatatctaactgcgcttcacgcgtcaccaccggcgcgttgggcgtatcatcagatggaagcagaaatccgaccaccaatacaatggcggcaataatgatcccccgacgatgcatcggcggcagcgggtccatgaagcgaaaattgtccggcgcgtgccagactttctccagggttggttttagttcaaagcgcccgggcatggtttcctcctgctccgcgtcttgttcctcaatcatagcctatgaataagctaacgctatgatgtccgtggtaaacccgcctttattatattcatacgggatattgctattgtttctttttccctgggatttgtcatcattcccgcgacaaagttttacccaaagaagtgtggctgatatgctgcccgctactttataccctaagaaaggaaatacgatgaccaccccaacttttgacaccatcgaagcgcaagcaagctacggcattggtttgcaggtagggcaacaactgagtgaatctggcctggaagggctgctgccagaagcactggttgcaggtattgccgatgcgctggaaggcaaacatccggctgttccggttgatgtggtgcatcgcgcgctgcgtgaaatccacgagcgcgccgatgccgttcgtcgtcagcgtttccaggcgatggctgctgaaggtgtgaaatacctggaagaaaacgccaaaaaagaaggtgtgaatagcaccgaatctggcctgcaattccgcgtgatcaaccagggtgaaggcgcaattccggcacgtaccgaccgcgttcgtgttcattacaccggtaaactgatcgacggcaccgtgtttgacagctccgttgctcgtggtgaacccgctgaattcccggttaatggcgtgatccctggctggattgaagcactgactctgatgccggtaggttctaaatgggaactgactatcccgcaggaactggcatatggcgagcgcggcgcaggcgcatccatccctccgttcagcaccctggtgtttgaagtcgaactgctggaaatcctctaagcagcgcattctgttcccctcgaacgagaggggagcaggcattcagcaataaacccttcagtttgccaaacggcgctattttgtgttgcaaagaccccgtaagcgtgtatttttgtgagctgtttcgcgttatcaccgtgatatgacactcactttaaacataaaattaacattagatctaaatcttagtattcatcccgcgtattgttacctaatatcgatgagtcccgatacagattcgtcgtatcatagactgactaaaggccgtagagcctgaacaacacagacaggtacaggaagaaaaaaacatggtagatcaggtaaaagtcgttgccgatgatcaggctccggctgaacagagcctacggcgcaatctcacaaaccgacatattcagcttattgccattggcggtgccattggtacggggttgtttatggggtctggcaaaacgattagccttgccgggccgagcatcattttcgtttatatgatcattggttttatgctctttttcgtgatgcgggcaatgggggaattgctgcttagcaatctggaatacaaatcttttagtgacttcgcttccgatttactcgggccgtgggcaggatatttcaccggctggacttactggttctgctgggttgtaaccggtatggcagacgtggtggcgatcacggcttatgctcagttctggttccccgatctctccgactgggtcgccagcctggcggtgatagtgctgctgctgacgctcaatctcgccaccgtgaaaatgttcggtgagatggagttctggtttgcgatgatcaaaatcgtcgccattgtgagcctgattgtcgtcggcctggtcatggtggcgatgcactttcagagtccgactggtgtggaagcgagtttcgcgcatttgtggaatgacggcggctggttcccgaaaggtttaagtggcttctttgccggattccagatagcggttttcgctttcgtggggattgagctggtaggtacaacagctgcggaaaccaaagatccagagaaaagtctgccacgcgcgattaactccattccgatccgtatcattatgttctacgtcttcgcgctgattgtgattatgtccgtgacgccgtggagtagcgtagtcccggagaaaagcccgtttgttgaactgttcgtgttggtagggctgcctgctgccgcaagcgtgatcaactttgtggtgctgacctctgcggcgtcttccgctaacagcggcgtcttctctaccagccgtatgctgtttggtctggcgcaggaaggtgtggcaccgaaagcgttcgctaaactttctaagcgcgcagtacccgcgaaagggctgacgttcagctgtatctgtctgctcggcggcgtggtgatgttgtatgtgaatcctagtgtgattggcgcgttcacgatgattacaaccgtttccgcgattctgtttatgttcgtctggacgattatcctttgcagctaccttgtgtatcgcaaacagcgtcctcatctacatgagaagagcatctacaagatgccgctcggcaagctgatgtgctgggtatgtatggcgttctttgtgttcgtggtcgtgttgctgacactggaagatgacactcgccaggcgctgctggttaccccgctgtggtttatcgcgctggggttgggctggctgtttattggtaagaagcgggctgctgaactgcggaaataaccgcattatcatgctggatggcgcaatgccatccagcttttagatcactcacccgccagcgcgcgtgggaacagtacattgttttccagactgatgtgatccatcaggtcatcaatcagttcattaatgccgttatacatcgctttccaggtggtgcaggcttctggcggcggtgtgacgttattggtggtgtgtttaatcacttccagcagttcgcccgcttcatcgtgctcgctttccattacgctgattggccccattgcctggctgcccatgccttgtttgatcatcgggaagaggatctgctcttctttcatcatgtggctggaaagctcttcatgcagcatggtcaggtattttgtcagcccttttggcacgctcggtttgtcggcgtgaacgcgctcgactttagtcgcttgcagaatcagctccggcagttgctcgcggtgacgatcgtggtagcgcacgatgatatggtcgatgatttctgccagcggggcgctacgccagtctttctcaatcggttgttcagcgagctttgccagttcagcttcaatgacctcaacatccagttctttacgtgccgccgcgcgcgccagcgtctgcttaccgccacagcagtaatccatatcatatttacgaaacagagcactagcgcgaggaatagagagcgccagttcacctaaaggttggtcgcgataagccatagctgatacctcattcttaataagataagatgtattttaaatgcatctttaaggcaaaagctataacccttacgtagcagaggcttatttaactcactgccagcgtgtcaactttcactgacagattcagttaaaggtttttctggttttgctctgaccgcgatgaccacgccaatcactaacagcgcgataccgctcagcgtcattagcggcggcatttgctggcggagtaaaaaggtgtacagcaaacctgccagcgtttcgaaaacaatcagcggcccgagaatcactgtcggtaatagctggctggcgacgttccagcagagtgcgccaacccaactgcaaagcacggctatcgcaaccatcagactaataaacaccagcggacgggggccaaagggtagggagaagtccggcgtttgcgtattcagccagtaacaagcgacgagatagccgataagactaaccggcagtgtgaccagcgcctgcgctgttgcccacatcatcggatgtttgtcgggattttcccgcagccagcgggcgttgcgcagggcataccacgcccagcagaccacggaaactaacgccagcacgatgccagaggtataacgtgcccagtcaaaatcggggagtccgtggtttaactcagcaatattcacacacgccaggccgatgccaatacaaatcagtgctggggcgagttttccccacgcgagtttgccgtcgcgctggctataaagcagattggcaaagacaggaatgaccaccggcagggtgccgataatcatcgtggaaacaggcgcgccagtacgttgaatggcactggcaaggcagaagtaatagatgaggttgcccatcatagtgagcatcaaggcggtaagccagtcgcgacgcgccaactgacgcagacgcacgcgtcccagccaggcaatgggcagcgcaattaaccctaacgccagataacgccccatgctctgcaacatcgccgggtattccggcacgatcaacggcccgacaaaaataagcccccacatcaaccctgctaacagggcgtacagcacgccgctaatcattactggcatccattgatctgtcagaagaaagttcaggaagcagacatgattgctcccggcatcccgtcattatcagagaggatgcgggaggatgccactttaattaattagttattaacattaaaaagatggcttacgctttcggctaacgttgtcgttgggtggccaatcaatttgctaagtgttttgctgtcatcaaacagaccgcctttgcttgcgccaacgtcagaatccgccagcatatccgccagtccgtcgggcagtccgacgcttttcagtgccgcggcgaaatcggcttcgctcagattttgataggtaacctgtttgccgctctgtttggtcagctctgccgctaactgtgtcaacgtccaggcactatcgcccgccagttcgtaaaccttgccttcgtgaccggcttcgctaatcacgcgtgccgcagctgccgcataatctgcccgcgttgcactggcgattttgccatcgcccgccgcaccgataaatacgccgtgttccagtgctgccggggcgctggcgaggtagttttcgctgtaccagccgttgcgcagcagggtgtaaacgatgccagaatcagccagcattttctccgtctcgatgtgctcatcggcgaggccgagcggggaggtatctgcatgtagcaggctggtataagcgataaatttcacgccagccgcctttgcggcattaataacattacgatgctgcggggcacgttgacccacttcgctggaagagatcagcagtagtttttccactccctgaagtgcagatgtcagtgcggcttcatcgccgtagtcagcctgacgcacggtaatgccttgtgctgccagggcttgggcttttgccggattacgaacgatagccactatttggctggcaggaaccgttttcatcaaggattcaataacatagtgaccaagttggccagtggcaccagtaatagcgatcatgggaagtctccatcgttttgtcttgtgtttaaatacgctaacacctaaacttacttttagtaagtacgtacaaaaaggtaagtatgaaatgagtcaggttagcctgagccaacaactgaaagagggtaatctctttgcggaacagtgcccgagccgcgaggtgttgaaacacgtcaccagccgttggggggtgttgattctggtggcgctacgcgaaggtactcatcgctttagcgacctgcggcgcaaaatcggtggggtgagtgaaaagatgcttgcgcagagcttacaggcgttagaacaggatggttttcttaaccgtatcgcgtatccggtggtgccgccgcatgtggaatatagcctcacgccgctgggcgagcaggtgagcgaaaaggttgctgcactggcggactggattgagttgaatttgcccgaggtgttggcggtgcgggatgaacgtgcggcataactgccggatgcgctgagcttatctggtctacggtgcatggcttgtagggcggataagatgcgccagcatcgcatccgccaataaatgccggatgcggttgatgatttataggccgaaaaagaagtgttttacttactcaaatccacctgataaatcgcaaacccgatatcatcggtcgcgactttattcatcggatactgccctttctctttaataaacgctgcggctttatcactcggagaggtttcgaaacggatatccagtttcttatcgccagctatcggtgctaaacgccagttgttatctgccgccgggtgaatttcccccgcacgtttgctctcatcagcaatccacgctgccagcacgctgcggttctcatccggactagcaaaagcgatatggctgtcgcccgtaccggcaaatttgccgccgtaagcgcgatagttattggtggcaaccaggaacatggcgttcggatcaatcggcttgccattaaaggtcaggttcttaatcctttccgcattggcattaatcatctggcactcgccgtcataacgggcgggctgggtaacatcaatctgataattcacaccatcaataacatcaaagttataagtgcggaaaccatcccagttgatgagactctgtggtttcgtgctgttgggatcaatctggttaaactgtcccgcggagcactccagccactctttcacctctttaccgctggctttcaccacaatcagcgtattgggatagagataaagatcggcggcattacggaaggtcaactggcctttttccacctccacatagcttgccgggtcatttttgcgaccaccgactttaaacggtgcggcagcactaagcaccggcagttttgccagatccggatcgccctgaatgtaatgctcgacatacgctttttgcgcgttgttcaccacctgcacggtcggatcgtcctgcaccagcgccagatagctatacatattgtcggcagatttaccgattggcttgctgacgaactggcgtgtggcatcgtgatcggctttgagtgtttctaccagcttgctgtcttccgccgcgagggattttttattagcgatgtcgtaaatcggtcgtgcttccgctttcgcctgcgtcacctgccatttaccgctgtcattactgagttgtaagtcgaccacaccaagatgatcgccccacatgcctggcattaccgccggaacaccattcagcgtgcctttggcgatatcagccccttcgatatcagcaaaatctttacctgggaaaacggcgtgagcatggccaaacataatggcgttaacgcccggaatttcactgaggtaataaacactgttttccgccatcactttatacggatcggcagatagcccggaatgtgccagaacgacaacaacatcggcacctttctcgcgcatttcaggcacgtatttgcgcacggtttcggtaatatcattcaccgtcactttcccggataaattagctttatcccagcccatgatttgtggtggcacgacgccaatatagccaatcttcagcgtctgtttttttccgtctttatcgaccacttcggtgtctttaattaaatacggtgtaaacattggctgtttggttctggcgtcaatgacgttggcatttacataagggaatttcgctcctgccagcgcatttttcaggtaatccagaccgtagttaaactcgtggttgccaagcgttccgacggtatagtccagcgtatttaatgccttatagaccgggtgaatatcacctgcttttaatcctttcgcgctcatgtaatcggccagcggactcccctgaatcaaatcgccgttatcaaccagtacgctgtttttcacttcattgcgggcatcgttaatcaggcttgccgtacgtaccagtccgaatttttccgtggcggtgtctttgtaataatcgaaatccatcatgttgctatgcagatcagtggtttccatgatacgcagatcgaccgtcgctgcattcacactggcggcaatcagcgtggccaggagcgttgcgctaaacttaatcatcagggacatccttttatcatcgggaatacgaaagaaaagggagaataaacgtcttacttatagaacagtgaagaatgccacaattttacgctttgaaaatgatgacactatcacagttggcgcattcattaacgatagggtataagtaaaacaataagttaacaccgctcacagagacgaggtggagaaatgttagatcaagtatgccagcttgcacggaatgcaggcgatgccattatgcaggtctacgacgggacgaaaccgatggacgtcgtcagcaaagcggacaattctccggtaacggcagcggatattgccgctcacaccgttatcatggacggtttacgtacgctgacaccggatgttccggtcctttctgaagaagatcctcccggttgggaagtccgtcagcactggcagcgttactggctggtagacccgctggatggtactaaagagtttattaaacgtaatggcgaattcaccgttaacattgcgctcattgaccatggcaaaccgattttaggcgtggtgtatgcgccggtaatgaacgtaatgtacagcgcggcagaaggcaaagcgtggaaagaagagtgcggtgtgcgcaagcagattcaggtccgcgatgcgcgcccgccgctggtggtgatcagccgttcccatgcggatgcggagctgaaagagtatctgcaacagcttggcgaacatcagaccacgtccatcggctctagcctgaaattctgcctggtggcggaaggacaggcgcagctgtacccgcgcttcggaccaacgaatatttgggacaccgccgctggacatgctgtagctgcagctgccggagcgcacgttcacgactggcagggtaaaccgctggattacactccgcgtgagagcttcctgaatccggggttcagagtgtctatttactaaattcagatggcagaaacagtgtatttcctgattctgccatcctgatttctcccaacctaaaaagttataaataaaaagagattgtatttaaagtgcaaaaattcaattgctaataagttacattttaataatgagcgttttttgatagtttacttctatagtgagatatttaatggcgacataaagtaaccaaataaaataaggttgtcatatgttacccaggatcagacacaataattttattggtgcggtggagttatttgtaaagtctagctatacaaaaacacatagtaacaatttttttaacaacatccatcatgcatttaagaaaaaagattggattagcaattatgatagcctgttaactttgagggagttctttcgttgcgcaactcagattgataaaagtggttatcaggtgcttagtagtaaaaatgaaactgttcacgccatggataagtttcttatcagtttcagccttaaagataacggtgccgaatatacaatgacattgcgaggtagtggatttgaatacgaagaaatacccataacaataaatgaatataacagtttcatggatttcaaaaaccgtgaatttccgttagaacaaaacagacgattgtatgcccgggatattctacagaaaaaacagtctgacataccgaaaaggattaaaggttatattcaccaggcgattggtgacgtgtctttaggttatgccttattggaggatatagtaagcaaattaaaacggggtaaatttgaactccaaataccaggaggtggaattaaagaatgcgatggatggtatatttacgaaaaaataattgatgataattttgccatagtcatagaatctttgggctttgcgcttaaaatctatggaggggatgaacgttttcgtaatggttcctctgttgttttggaggatgaagattactctcttatttataattttctggttaatgcaggttgccaacaagtcgaattagccgaacaagtggatgcgatagtaagtgcgaatctggccgcagatagcgatattaccaaagaaaagatttgcgagaaatataaaagcaccattgaggcgtttaaaaaagagcaactagcgttaccagtattagttcggcgtaagaacagtgagacttaattcccctatcccatagataacgataggggaaaattatttttgcagaatttatgttattgccattatttgagcaacttttgcagcaggtccatcacttgctgcacctcttccggtgtgagcgccccgtctttggcccattgcacgcgaccatccttatccagcaccactacagcggaactttcttcatccagctgccaggcaccgagcgcgacgccattgctatcgacaataaactggctccagggataaagctttttattactctccagactgctgcgcacaaacatcccactacccggaatcgcgtcgtcggtgttaacaatggtggtggtctggtaacgatcgtgcggtaacttcgcacttttaatcgcttcaatcagcgtcgcgtttttctcttttgcagaggtgcgaccagcaatatgttgcagtactcgcacttttcccactaactgcgcgctgttccaggttttgtagctaaactgatctttatcaagcaccaactcgccccgatcggtaatgccaatcggcggcactcgctgaccggtttcgaactgatgtgcggaagccatcatcggcaacagcaggcaggtgagtgccagaatcttgcgtagggtcatggtgtttccttcttatgatatgcaggtgatccgaccacttgggtctgagttttaatcatatgtgctatttatcgaatttcccgcaagtgtgatgccagtttgcggtcaagcgcacaaatcatatgaaaaatgaatgcttatactgaagaccgcgcttcggtaaaaagataattctgaataattgtaacctttaggtaaaaaaagttatacgcggtggaaacattgcccggatagtctatagtcactaagcattaaaatttgcgcctcataatagttgggccgattgtggcaccgcacaggcgtaatactcagcaggagataacaatgaaaattttccaacggtacaacccacttcaggtggcgaagtacgtaaagatcctgttccgtggacggttatacatcaaggacgttggcgcttttgaattcgataagggtaagattcttatcccaaaagtgaaggataagctgcatttgagtgtgatgtccgaagttaaccgtcaggttatgcgtctgcaaacagagatggcttaaccaaagtgctatgcagtaaaaagtgctatgcagtaataagacggctcctgattcaggagccgttgatgtttctgggggttacgcgacgctttcttctttatctttagcgtcaggcagttttgggctaagggcggtggccttgctgtcgatccgggtcaccagcagctggtcgatgcggtagttatcgatatccaccacttcaaatttgtagccggcgaatttcacgctatcggtgcgtttcgggatcttacgcagcataaacatcataaagccgccgatggtttcgtagttgccgctctgcgggaactcgtcaatatccagcacgcgcatgacgtcgtcaattggggtgccgccgtcaatcagccaactgttctcatcacgggcgacaatctgctcttccagcccctgaccgaccagatcgcccatcagcgtggtcatcacgtcattgagggtgatgatccccaccaccagcgcgtactcgttcatgatcaccgcgaagtcttcacctgcggttttaaaactttccaacgcctcactaagggttaacgtatccggcacaatcagcgtgttgcgaatttgtacgccgctgttcagtgccaggctttggttagccagcacgcggttcagcaggtctttagaatcgacataaccgatgatgtggtcaatatcttcattacagacgaggaacttagagtgcggatgttccgccaccttattcttcaggctttgctcatcttcgtggagatcaaaccaaatcacgttttcacgcggtgtcatactagacggaacggtacgggattccagctcaaagacgttttcaatcagctcgtgttcctgtttacgtaacacgcccgccagcgcaccggcttccactaccgcgtagatgtcatcagaagtgatgtcatctttacgtaccattggcagtttgaaaatacggaagattatgttcgccaggccgttgaagaaccacaccagcggggtgcaaacgtacaggcagaagcgcatcgggttgatgatacgcaaagccacagcttctggcgcaatcataccgatgcgtttcggggttaaatccgcaaacaggataaacatgccagtcactaagctgaaagagagaataaagctcagttgctcagagagctctgcgctcatatagcgggagaacaggctgtgaaaagctggagaaaatgccgcatcaccgacgataccgccgagaatcgccactgcgttcagaccgatttggaccacggtaaagaacatgccgggattttcctgcatattcagaacgcgttgggcatttatattgccttcatcagccagcagtttaagtttgattttgcgactggcggcaaggctgatctcggacatgctgaagaacgcacttacagcgatcaagcagagtatgactaaaatactgtttaacatatcttatccgacctttcaggccagatcctcggaaggggaagttgattaatttgtgtgaaatacacattgaaagccgattcgaagaaagtgaaccggcattttcagtggctagtatagcgtaaggtactgtaaagccgccagagggttaaaattcagacagctgaaaaatgcaaaactgcctgatacgctatgccgatcaggcctacgcagtccttgcaatatattgaatttggacgattttgtaggcctggtaagtcgtttacgccgcatcaggcatagacaaagagcactttatcaacaaactacatttgtacccgtaacgttatgcttccggcggcagacagacgccaattccgccaattccacagtaaccatacgggtttttatgcagatattgctggtggtcatcttcggcataataaaacggtgtggcgttagcgatttccgtggtgatgtgacgatcgtcatcggcggcaagcatcgccgcctgaaaacgttccagactggcgcgagctgcggcatcctgttctggggtcagcggataaatcgcactacgatactgcgtgccgtggtcattgccctgacgcattccctgggcgggatcgtgattctcccaaaatacctgtagcaactgctcatagctgatgacggaaggatcgtaaacaatgcgtaccgcttcggcatgacccgtatcaccggagcacacttcccgataagtcggatttggcgtatagccgccggtatagcctgcggcggtgctgtaaacgccgggtaactgccagaacagacgctccacaccccagaaacaacccatcgcaaaaatggcaatctccattccgtcaggtacattggtcatactgtgaccgttgaccgcatgcagcgtggctacgggcatcggggtgttacgtccaggcagggcatcggcgggggaaaccagatgctttttatcaaataaactcatggtgtcgctctcccgaaaatcggtcattggggttaaggttgtaacaagaggcgtatttgcacacaataaccaccgtgaataggtctaaagtaaaacataagaaatatttggggtttagtctgctttttaatccatattactggatttttgttaagccgtttaacggcgttccaggggcaggaaaaaaggatattcaggagaaaatgtgcgctatatccgacagttatgctgtgtaagcttactctgcttaagcggatctgccgtcgccgcgaacgtccgtctacaggtcgaggggttaagcggacagctggaaaagaacgttcgtgcgcagctttctacgattgaaagtgatgaagtgacgccagaccgtcgctttcgcgcacgcgtcgatgatgccatccgcgaaggtctgaaagcgctgggttattaccagccgaccattgaatttgatctccgtccaccgccaaagaaagggcggcaggtattgatcgccaaagtcacgccaggcgtgccggtgttaattggcggcaccgatgtggtattgcgcggcggcgcgcggaccgataaagactatttgaaattgctcgatactcgcccggctattggcacggtactgaaccagggcgattatgaaaatttcaaaaagtccttaaccagcattgcgttgcgtaaaggttatttcgatagcgaatttaccaaagcgcagctgggcattgcgctcggcctgcataaagccttctgggatattgattataacagtggcgaacgttaccgctttgggcatgtgacctttgaaggaagtcaaatccgcgatgaatacctgcaaaatctggtgccgtttaaagagggcgatgagtacgaaagcaaagatctggcagaactgaaccgccgactttctgctaccggctggtttaacagcgtggtggtggctccacaatttgataaagcgcgcgaaacgaaagtattaccattgacgggcgtggttagcccgcgaacagaaaacaccatcgaaaccggggtcggttactctacggacgtgggaccgcgcgtgaaagcgacgtggaaaaagccgtggatgaactcttatggtcacagtctgaccaccagtactagtatttccgcgccggaacagaccctcgacttcagctataaaatgccgctgctgaagaatccactggaacaatattatttggtgcagggcggttttaagcgcactgacctgaacgataccgaatctgactccactacgctggtggcttctcgctactgggatctctccagcggctggcagcgtgccattaacctgcgctggagtctcgaccactttactcagggtgaaattaccaataccacgatgctgttttatcctggggtgatgattagccgcacgcgttctcgtggtggcctgatgccaacctggggcgacagccaacgctactctatcgactactccaacacggcctggggtagtgatgtcgatttctccgttttccaggcgcagaacgtctggatccgcacactgtacgatcgccatcgttttgttacacgcggcacgctgggctggattgaaaccggtgatttcgacaaagtaccgccggatctgcgtttcttcgccgggggcgaccgcagtattcgtggctacaaatacaaatctatcgctccgaaatacgccaacggtgacctgaaaggggccagcaagttgataaccggaagcctggaataccagtacaacgtgaccggaaaatggtggggcgcggtgtttgtcgatagtggcgaagcggtaagcgatattcgccgcagcgactttaaaaccggtaccggggtcggcgtgcgctgggaaagcccggtcgggccaatcaaactcgattttgccgtaccggtcgcggataaagacgaacacgggttacagttttacatcggtctggggccagaattatgagtttatggaaaaaaatcagcctcggcgtggttatcgttatcttactgttgctgggaagcgtggcgtttctggtgggcaccaccagcggcctgcatctggtatttaaagcggcggatcgctgggtgccaggactggatattggcaaggtcaccggcggctggcgcgatctcaccttgtctgacgttcgttatgagcagccaggcgtggcggtaaaagcgggcaatctgcatctggctgtcgggcttgagtgcctgtggaacagcagtgtttgtattaatgatctggcgctgaaagacattcaggtcaacatcgacagtaaaaaaatgcctccttctgaacaggttgaagaagaggaagatagcggtccgctggatctctccacgccgtatcccatcaccctgacacgggtggcactggacaacgtcaacattaagattgatgacaccacggtaagcgtgatggacttcacctccggcctgaactggcaggagaaaaccctgaccctgaaaccgacgagcctgaaaggcctgctgattgctctgccgaaagtggcggaagtggcgcaggaagaagtggtcgaaccgaaaattgaaaatccgcagccggatgaaaagccgctcggcgaaacgctgaaagatctcttttctcgcccggtattgccggaaatgaccgacgtgcatttgccgcttaacctgaacattgaagagtttaagggcgagcagctgcgcgtgacgggcgacacggacatcaccgtgagcaccatgctgctgaaagtgagcagcattgacggcaatactaaactggacgccctggatatcgattccagtcaagggatcgtcaacgccagcggcacggcgcagctgagtgacaactggccggtggacatcactctcaacagtacactgaacgtggagccgttgaaaggtgaaaaagtgaagctgaaaatgggcggcgcgctgcgcgaacagctggagattggcgttaatctttccggtccggtggatatggatttacgcgcccagacgcgactggcggaagccggattgccgctcaacgtggaagtgaacagcaaacagctttactggccgttcactggtgagaagcagtatcaggcggatgatctgaaactgaaacttaccggcaaaatgaccgattacacgctctctatgcgtacggcagtgaagggacaggagatcccgcccgcgactattaccctcgacgccaaaggtaatgaacagcaggtcaatctcgacaaactcaccgtcgcggcgctggaagggaaaactgaactcaaggcgttgctcgactggcaacaggccattagttggcgcggtgagctaacgcttaacggcattaacaccgccaaagagttcccggactggccgagcaaactcaatggcttgattaaaacccgcggtagcctgtacggcggcacctggcagatggacgtgccggagttgaagctgaccggtaacgttaaacagaacaaagtgaacgttgacggcacgctgaaaggcaacagttatatgcagtggatgatcccagggcttcatctggaactcgggccaaacagtgccgaagtgaaaggcgagctgggggtaaaagatctcaatcttgatgccaccatcaacgcgccggggctggataacgcgctgccggggcttggcggtacagcgaaagggctggtgaaagtacgcggcacggtggaagcgccacaactactggcagatatcaccgcgcgcggcctgcgctggcaggaactttccgtggcgcaggttcgcgtggaaggcgatatcaaatccaccgatcagatcgccgggaaactcgacgtacgcgttgagcaaattagccagccggatgtaaatatcaacctcgtcaccctgaatgccaaaggcagcgaaaagcagcacgagctacagttgcggattcagggggagcctgtctccgggcagcttaatctggcaggaagttttgatcgcaaagaagaacgctggaagggaactcttagcaatacccgcttccagacgccggttggcccgtggagcctgacccgcgatattgcgctggattaccgcaataaggagcaaaaaatcagcatcgggccacactgctggcttaacccgaatgcggaactgtgcgtgccgcaaactatcgatgcgggggccgaagggcgtgcggtggtgaatctcaaccgcttcgacctcgccatgctgaaaccgtttatgccagaaaccactcaggccagcggtatcttcacgggtaaagcggacgttgcctgggacaccacgaaagaggggctgccgcagggcagtatcacccttagcgggcgtaacgtgcaggtaacgcaaaccgtcaacgatgcggcgctgcccgtggcgtttcagacactgaatctgacggcggaattgcgtaacaaccgtgccgaattgggctggaccatccgcctgaccaataacggccagtttgatggacaggtgcaggtgaccgatccgcaaggccgccgtaatcttggtggcaacgtcaatatccgtaacttcaaccttgcgatgataaaccccatctttacccgtggggaaaaagcagcggggatggtgagtgccaacttgcgtctgggtggtgatgtgcaaagcccgcagttgtttggtcagcttcaggttacgggtgtggatatcgatggcaactttatgccgtttgatatgcaaccgagccagcttgcggtcaactttaacggtatgcgcagcacgcttgccggtacagtacggacccagcagggtgaaatctacctgaacggtgatgccgactggagccaaattgaaaactggcgggcgcgggtaacggcgaaaggcagtaaagtgcggatcaccgtgccgccgatggtacgaatggatgtaagcccagatgttgtattcgaggctacaccaaacctgtttaccctcgatggtcgcgtggatgtcccttgggcgcgcatcgtggtgcacgatctgccggaaagcgcagtaggcgtctccagcgatgtggtgatgcttaacgataacctgcaaccggaagagccgaaaacggcgagcattccgattaacagtaacctgattgtccacgttggcaacaatgtgcgcattgacgcctttggcctgaaagcgcggctgacgggcgatctcaatgtcgttcaggacaaacaagggctgggtctgaacgggcagatcaacatccctgaagggcgcttccatgcctatggtcaggatctgattgtgcgtaaaggtgagttactgttctctggtccgccagatcaaccgtatcttaatattgaagctattcgtaacccggatgctacagaagacgacgtaatcgccggagttcgcgtcactggtctggcggacgaaccgaaagcggagatcttctctgacccggcgatgagccaacaagctgccttgtcttatttgctacgtggacaagggctggagagcgatcagagcgacagtgcggcaatgaccagcatgctgattggtttgggggttgcgcaaagtggccagattgtgggtaaaatcggcgagacgtttggcgtaagcaatttagcgctcgacacccagggagtaggcgactcctcccaggtagtggtcagcggctatgtattgccaggtctgcaagtgaaatacggcgtgggtatatttgactctatagcaacactcacgttacgttatcgcctgatgcctaagctatatctggaagccgtgtctggtgtagaccaggcactggatttgctctatcagttcgagttttaacaatgcgaatatttgtctacggcagtttacgccacaaacaaggcaacagtcactggatgaccaatgcccagttactgggcgatttcagtatcgataactaccagttgtatagcctgggccactatccaggcgcagttccggggaacggaacggtacacggtgaagtttatcgtattgacaacgccacgctggccgaacttgatgccttgcgcaccaggggcggtgaatacgcgcgccagttgattcagacgccgtacgggagtgcatggatgtacgtttatcaacgacccgtcgatggattaaagctaattgaaagcggcgactggttagacagggataagtaaccatatgcatacgccaccttcgggtggcgttgttttttgcgagacgactcgcattctgttttgtaattccctcaccttttgcttttctctccgagccgctttccatatctattaacgcataaaaaactctgctggcattcacaaatgcgcaggggtaaaacgtttcctgtagcaccgtgagttatactttgtataacttaaggaggtgcagatgcgtattaccataaaaagatgggggaacagtgcaggtatggtcattcccaatatcgtaatgaaagaacttaacttacagccggggcagagcgtggaggcgcaagtgagcaacaatcaactgattctgacacccatctccaggcgctacagccttgatgaactgctggcacagtgtgacatgaacgccgcggaacttagcgagcaggatgtctggggtaaatccacccctgcgggtgacgaaatatggtaaagaaaagtgaatttgaacggggagacattgtgctggttggctttgatccagcaagcggccatgaacagcaaggtgctggtcgacctgcgcttgtgctctccgttcaagcctttaatcaactgggaatgacgctggtggcccccattacgcagggcggaaattttgcccgttatgccggatttagcgttcctttacattgcgaagaaggcgatgtgcacggcgtggtgctggtgaatcaggtgcggatgatggatctacacgcccggctggcaaagcgtattggtctggctgcggatgaggtggtggaagaggcgttattacgcttgcaggcggtggtggaataaggtgtgtttatttatcgcgggcataaaaaaacccttactaaccgaagcccggcgttcagggttattacgccagaagaacttatttattctttgcgcgctcgaaggaggcaacgatttcagctttagcggcttctgcgttttcccaaccttcaactttcacccacttgcctttttcgaggtctttgtagtgctcgaagaagtgagcgatttgcgctttcagcagttcaggcagatcgttaacgtctttaatgtgatcgtattctttgctcagcttgctgtgcggaaccgcaaccagtttcgcatcttcaccggcttcgtcggtcattttcagaacgccaaccggacggcaacggatcacagaacccggctgcagcgggtacggagttgggaccagtacgtcaaccgggtcaccgtccagagacagggtgtggttgatgtaaccgtagttgcatggatagaacatcgcggtggacatgaagcggtcaacgaacagtgcgccgctctctttgtcgatttcgtatttgatcggatctgcgttagccgggatctcaataacaacgtagatgtcttccggcagatctttacccgcagggacgttgagtaagctcatgtctgtttcctttaaaaatatgtggcaaacaagtgccgagtattatagccaactcgcgccgaatgtcttcgcttgttttcgtcttcattttcctttttcaccagttttaagacggtatacagagcaggaaaatccataaccgtagccgcatttttcatagtgagatgaaagcgattacaaacttgtgattaacgttttatttacttttttgaagtgtgatgtaacgcaatctgttacataacgaattgtctatagttttttcgcgaacatcttttaaccaataataactaccccgacgaggacaaccctatgtggaaacgcttacttatagtctctgcagtcagcgcagccatgagctctatggcgttggccgctccattaaccgttggatttagccaggtcggaagcgaaagtggctggcgtgccgcagaaaccaatgtggcgaaaagtgaagccgaaaagcgcggaatcacgttgaaaattgccgatggtcagcaaaagcaggaaaaccagattaaagcggtacgttccttcgttgcacaaggggtggatgcgatctttatcgctccggtggtcgcgacaggttgggaaccggtattaaaagaggcgaaagatgccgaaatcccggtattcttgctcgatcgttccattgatgtgaaagacaaatctctctatatgaccaccgtcactgccgacaacatcctcgaaggcaagttgattggtgactggctggtaaaagaagtgaatggcaaaccatgcaacgtggtggagctgcagggcaccgttggggccagcgtcgccattgaccgtaagaaaggctttgccgaagccattaagaatgcgccaaatatcaaaatcatccgcagccagagtggtgacttcacccgcagtaaaggcaaagaagtcatggagagctttatcaaagcggaaaacaacggcaaaaacatctgcatggtttacgcccataacgacgacatggtgattggtgcaattcaggcaattaaagaagcgggcctgaaaccgggcaaagatatcctcacgggttccattgacggtgtaccggacatctacaaagcgatgatggatggcgaagcgaacgccagtgttgaactgacgccgaatatggcaggtcccgccttcgacgcgctggagaaatacaaaaaagacggcaccatgcctgaaaagctgacgttaaccaaatccaccctttacctgcctgataccgcaaaagaagaattagagaagaagaaaaatatggggtattgagggttgctatgcctgatgccgattcgtaggccggataaggcgctcgcgccgcatccggcgatggtgcactgaagcctgatgcgacgcttaccgcgtcttatcatgcctactgggagcacgctttacaccgggggaaaccatgacgaccgaccaacaccaggagatcctccgcaccgaaggattaagtaaatttttccccggcgtcaaagcgttagacaacgttgatttcagcctgcgccgtggcgaaatcatggcgctgctcggtgaaaacggggcgggaaaaagtacgctaatcaaagcattaactggtgtataccacgccgatcgcggcaccatctggctggaaggccaggctatcagtccgaaaaataccgcccacgcgcaacaactcggcattggcaccgtctatcaggaagtcaacctgctacccaatatgagcgtcgctgataatctatttataggccgcgaacccaaacgcttcggccttctacgccgcaaagagatggaaaagcgcgccaccgaactgatggcatcttacggtttctccctcgacgtgcgcgaaccgctcaaccgctttagtgtcgcgatgcagcaaatcgtcgctatttgtcgggctatcgatctctctgccaaagtgctgatcctcgatgaacccaccgccagtctcgacacccaggaagtggagttactgtttgacctgatgcgtcagttgcgcgatcgcggcgtcagcctgatttttgtcactcactttctcgatcaggtctatcaggtcagcgatcggatcaccgtcttacgcaacggcagtttcgtaggctgtcgggaaacgtgcgagctaccgcagatcgaactggtaaaaatgatgctggggcgcgagctggatacccacgcgctacagcgtgccgggcgaacattgttgagcgacaaacccgttgccgcgttcaaaaattacggcaaaaaaggaacgatcgcaccgtttgatctcgaagtacgccccggcgagatcgtcggtctggctggattgctgggaagtggacgtaccgaaaccgccgaagtgatcttcggtatcaaacctgctgacagcggcacggcgttgatcaaaggcaaaccgcaaaacctgcgaagcccacatcaggctagcgtactgggcattggcttctgcccggaagacaggaaaaccgatggcatcatcgctgccgccagcgtgcgggaaaatatcatcctcgctctccaggcccagcgcggctggctacgtcccatttcccgcaaagaacagcaagagattgccgaacgctttatccgccagcttggcattcgcacacctagtactgaacaaccgattgaatttctctccggcggcaatcagcaaaaagtgttgcttagtcgttggctactgacccgaccgcaatttctgatcctcgatgagccaacccgcggcattgatgttggtgcccacgccgagatcatccgcctgattgaaacgctatgcgccgatggtctggcgctgctggtgatctcctccgaactggaagagctggtgggctatgccgatcgggtgattatcatgcgcgatcgcaaacaggtggcggagatcccgctggcagagctttccgttccggcgatcatgaacgccattgcggcgtaaggagaacagtgtgatgcctcaatctcttccggacaccactacgccaaaaaggcgctttcgctggccgacggggatgccgcagctggtagcactgttgctggtgctgctggtcgatagcctggtagccccgcatttctggcaggtggtgcttcaggatgggcgtttgttcggtagccccatagacattcttaaccgtgcagctcccgttgcgttactggcgattggcatgacgctggtgatcgccaccggtgggattgatctctccgtaggggcggtgatggctatcgccggagccacaacggctgcgatgacggtcgcgggattcagcctgccgattgttttgttaagcgccctgggcaccggcatcctggcgggattgtggaacggcatactggtagcgatcctcaaaattcagccgtttgtcgccactctgatcctgatggtcgccgggcgcggcgtggcgcaactgatcaccgccgggcagatcgtcacgtttaacagcccggatctcagttggttcggcagtggaagcctgttgttcctgccaacgccggtcattatcgcggtgctgacgcttatcctgttctggctgttgacccgcaaaacggcgctggggatgtttatcgaagccgttggtatcaacattcgggcggcaaaaaatgccggggtaaacacgcgaatcatcgtcatgctcacttatgtgttgagcgggctgtgtgcggcgattgcgggcattatcgtggcggcggatattcgcggtgccgatgccaacaacgctgggttatggctggagctggacgccattctcgcggtggtgattggcggcggaagcctgatgggcgggcgctttaacctgctacttagcgtggtgggggcgctgattattcaggggatgaacaccggaattttgcttagcggctttccgccagagatgaaccaggtggtgaaagcggtggtggtgctttgcgtgctgattgttcagagccaacgctttatcagtctgattaaaggagtacgtagccgtgataaaacgtaatttgccactgatgatcaccatcggcgtctttgtgttgggttatctttactgcctgacccagtttcccggttttgcttccacaagagtgatctgcaatatcctgaccgataatgcctttcttgggatcattgccgttggcatgacctttgtgatcctcagtggtgggatcgatctctccgtcggtagcgtgatcgcctttactggcgtgtttctggcaaaagtgattggcgatttcggcctcagcccgctgctggcgtttccgctagtgctggtgatgggctgtgccttcggcgcatttatggggcttctgatcgacgccctgaagatcccggcatttatcattacgcttgcggggatgttctttttgcgcggcgtcagctatctcgttagcgaagagagcattccgataaaccatcccatttatgacacgctcagtagccttgcgtggaaaatccctggcggcggtcgcttaagtgcgatgggactgctgatgttggcggtggtggttatcggcatattcctcgcgcatcgtacccgttttggtaatcaggtatacgccattggcggcaacgcaacgagcgcgaatctgatggggatttccactcgcagcaccactattcgcatttatatgctctccaccggactggcaacgctggcggggattgtcttcagcatttatacccaggccggatatgcgctggcgggcgtaggtgtggaactggatgctatcgccagtgtggtaattggcggtacgcttttgagcggtggcgttggaacggtattagggacgctttttggcgtggcgattcagggactgattcagacttacataaactttgatggcacgctgagttcctggtggacgaaaatcgccatcggtattttgttgtttatttttatagcattacagcgtggattaacggtgctgtgggagaatcgtcagagtagcccagtgacaagagtcaacattgcgcagcaataaaaacgcctctccgtgtggagaggcgcaggagattacgcgtccgggaactcacggataaagcgttcgacatcttcaaccatatggtcgttgccgacaaagaaactacggcgctggtgcagggtttccgggatgatatccagaatacgctctttgccatcgctcgctttaccgcccgcttgttccgccaggaatgccatcgggttgcactcatacagcaaacgcagtttgccgtccgggtggctggcggtgcttgggtagagataaataccgcctttcagcaggttacggtggaaatccgcgaccagactaccgatataacgactggtataagggcggttggtggatttatcttcttcctggcagaatttaatgtacttcttcaccccgttcggaaacttaatgtagtttccttcgttgatggagtaggttttgcctttctccgggaagcgcatccgttcctggcacaggcagaaaacgccgaggctaggatcgtaagtaaaggcgtgaacaccgcatccggtggtgtaaaccagcatggtagaggagccgtataccacgtaacctgccgcaacctgtttgttaccaggctggaggaaatcttcttccgttaccggcgtgccaacaggcgtaacgcggcggtagatggagaaaatggtaccgacagagacgttaacatcgatgttggagctgccatccagggggtccatcagcaccacgtattttgcgtgttcacagccttcaaagacgacaatctcatcttcttcttcagaggcaatgcccgcaacgatatcgcgtgctttcagtgcggctttcagtttttcattagcgaacaagtcgagtttctgctgaacctcgccctgcacgttctcagcaccgctggcacccaggatatcaaccagtcctgctttgttgatatcgcgatggataatcttggcgcccagttttattgcgctcagcaaagcagtgagctcaccggtagcatgagaaaactcgtgctgcttttcgacaataaattcacctaacgttttcataaaactttccctgcaatgtttatggagtaaagcgaccgcaacaatcttaacaaataatctcaatgttgcgctcaggtgaatcgcgccagcaaattacggattatcctgaaatgcgtttctcacttgcccgacatatgcgtaaaatgagcggcagattaaaaaaggatagtgacgtatgcgcattcatattttaggaatttgtggcacatttatgggcggtctggcgatgctggcgcgccagttaggccatgaagtaacgggtagcgacgccaatgtgtatccgccgatgagcaccttacttgagaagcaaggcattgagctgattcaggggtacgatgccagccagctcgagccgcagccggatctggtgattattggcaacgccatgacccgtggaaatccgtgtgtggaagcggtactggaaaaaaatatcccttatatgagtggtccacagtggctgcacgattttgtgctgcgcgaccgctgggtgctggccgttgccggtacacacggcaaaaccaccaccgcgggaatggcgacctggattctggaacagtgtggttacaaaccgggctttgtaatcggcggtgtgccggggaactttgaggttagcgctcatctgggcgaaagcgacttctttgttatcgaagcggatgagtatgactgcgccttcttcgacaaacgctctaaatttgttcattactgcccgcgtacgctgatcctcaacaaccttgagttcgatcacgccgatatctttgacgacctgaaagcgatccagaaacagttccaccatctggtgcgtatcgttccggggcagggccgtattatctggccggaaaatgacatcaacctgaaacagaccatggcgatgggctgctggagcgagcaggagctggtgggtgagcagggtcactggcaggcgaaaaagctgaccaccgatgcttccgaatgggaagttttgctggatggcgaaaaagtgggcgaagtgaaatggagcctggtaggcgaacataatatgcacaatggcctgatggcgattgcagcggctcgccatgttggtgtagcgccggcagatgccgctaacgcgctgggtagctttattaatgctcgtcgccgtctggagttgcgtggtgaagcgaatggcgtcacggtatatgacgattttgcccatcacccgacggcgattctggcaacgctggcggcgctgcgtggcaaagttggtggtacggcgcgcattattgctgtgctggagccgcgcagcaataccatgaaaatggggatctgcaaagacgatctggcacctagtttaggtcgtgccgatgaagtcttcctgctgcaaccggcgcatattccgtggcaggtggcagaagtggcagaagcctgcgttcagcctgcacactggagtggcgatgtggatacgctggcagatatggtggtgaaaaccgctcagcctggcgaccatattctggtgatgagcaacggcggttttggtgggatccatcagaaactgctggatgggctggcgaagaaggcggaagccgcgcagtaattcggccttagccagatatagtatgcgtaggccggataaggcgttcacgccgcatccggcatttgagcatagtgcctgatgcgacgcttgatgcgtcttatcaggcctacaggtgcaccgtatccggcaaaccatactcacatcaacaacgaaaattacccttcgttctccgctaactcgcgcagatactggaaaatctggcgtgcggatttcggcggcttattcccttctttctctttcttcgcgttgcggatcagagtacgcagttgctgacgatcggcatcgggccacagatttaatacctcagcgatggcgtcatcaccttgatcgatcagacgatcgcgcaggttttccagtttatggaacagcaccacctgctggttgtgacggtttttcagcttatccagcgcctgacgaataggctctacgtcgcgctggcgcagcatcttaccgatgagctgcaactggcggcggcgaccttccatcttaatacgctgggcgagctcaatagccgcgcgcagatccgcatctaacgggatcttatccagcgcgtttttccccagatcaacaatttccgcgccaaggcgttttagctcctcggcatcacgtttaatttcacttttactgacccagataatttcatcgtcttcgtcttcgatgtcatcaccgggaacgtcgtcgagccagtcttcgggctgcttagtcatctcaggctccttaaaaaaagaggctaatgttaccagttaagatgcgcactgaaaaacggttctctgttagacttcagagaaactctctacattatggcacttgcaatgaaagtaatctctcaagttgaagcgcagcgcaagattctggaagaagcagtttccactgcgctggagttggccagtggcaaaagcgacggtgcggaagttgccgtcagcaagaccaccggcattagcgtaagcacgcgttatggtgaagtggagaatgttgaattcaatagcgatggcgcgctggggatcactgtttatcaccagaaccgcaaaggtagcgcaagttccaccgatttaagcccgcaggccattgcccgtactgtacaggcggcgctggatattgcccgttataccagcccagatccctgtgccggcgtggcagacaaagagctgctggcctttgacgcaccagatctcgacttgttccaccctgcggaagtttccccggatgaagccattgaactggcggcccgcgcagaacaggcggcattgcaggcggacaaacgcatcaccaataccgaaggtggcagctttaacagccactacggtgtcaaagtttttggcaacagccacggcatgttgcagggttactgcagtacgcgtcatagcctctccagctgtgtaattgccgaagaaaatggcgatatggagcgtgattacgcctacaccattggtcgtgcgatgagcgatctgcaaacgccagagtgggttggggccgactgtgctcgccgtactttaagccgtctgagtccgcgtaaactctccaccatgaaagcgccagtcatttttgccaatgaagtggcaaccgggctttttgggcatctggtgggggcgatagcgggtggaagcgtttatcgtaaatctaccttcctgctggatagcctgggtaaacaaattctgccggactggctgaccattgaagagcatccgcatctgctgaaagggctggcgagcacgccattcgacagcgaaggtgtgcgcaccgagcgtcgcgatattattaaagatggcatcctgactcagtggctgctgaccagctacagcgcgcggaaactggggctgaaaagcaccggacatgcgggcggtattcacaactggcggattgccggacaaggtctaagcttcgagcagatgctcaaagagatgggcaccgggctggtggtgacggaattgatgggccagggcgtgagtgccattaccggtgattattcccgtggtgcagcgggcttctgggtagagaatggcgaaattcagtatccggtgagcgaaatcaccatcgcaggtaatttaaaagatatgtggcgcaatattgtcaccgtcggtaacgatattgaaacacgcagtaatatacagtgtggttctgtgctgttgccggagatgaaaatcgccggacagtaaaaaaactggcgcgacctgccgcgctataaactaaaaaattacacaaaatcattcgcactgcatcgagacggaaagtgaatgagggccggggagcgtactcgcagtacgtgacccggtcgaatgagcgtagtcgtcgatgaggcagtgtgaaggatgaagtgtaaataaaaaaggaactattcttgcagtctcctcgttggtattcagttcggcgtcatttgctgctgatctcgaagacaatatggaaaccctcaacgacaatttaaaagtggtcgaaaaagccgataacgcggcgcaagtcaaagacgcgttaacgaagatgcgcgccgcagcgctggatgcgcaaaaagcaacgccgccgaagctcgaagataaaagtccggacagcccggaaatgaaagatttccgccacggtttcgacattctggtcggtcagattgacgacgcgctgaagctggcaaatgaaggtaaagtaaaagaagcgcaggctgctgcagagcaactgaaaacgacccgcaatagttatcacaagaagtatcgttaattcctcatttccctgttgcctgcactcaggtaacagggaacttatcatcgcaaatgatgcaccacctgattgctgctgccgcgccagatcagggaagggtcttttaaatcctgcacaaatttgccgtcgaccagcacgttaatcaaatcaacaacctgcatttgcgcagcgttgagttcgtcgagtttatagcctgtccacacccagatgtctttacccggacactcggcgcggatgcgttgtaccagtttcagaatatccggcacgttttgcggatgcagcggatcgccgccggagagggaaataccctggcgtttgatacgagtgtcattcagatcgttaatgatctggtcttccattgctttggtaaatggctgaccggaatttacccgccatgtgcttttgttatagcaaccggggcattcatgaacacacccggagacaaacagggtgcaacgagtgccggggccgttgacgatgtcgacaggatagtactgatgataattcattatttcgcctggcttatcagtccgcgtgtaggctgcatccggtaatcaatgcctgatgcgacgctgtcgcgtcttatcagacctggagcaattgccaaatgtaggccggataaggcgtttacgccgcatccggcatttgcttagctcagagtgaagattaacctatctgcccattccccaaatgtttaacgcggcgcttaacttcttcctgcttaccagcgttaaacggacgtgcatccgggctacctaaatatccgcacacgcggcgagttacgctcacacgggaggcgtcatggttaccacatttcgggcaagtgaagcctttgctggtgcactcgaactcaccggtaaagccacactcgtagcactcatcaatcggtgtattggtgccgtaatacggtacatgctgatagctgtaatcccagacatcttccagcgccttcaggttgtgctgaatgtttggatactcgccgtagcaaatgaaaccaccgttcgccagcggcgggtaaggcgcttcaaagtcgatcttgtcgtacgggttcaccttcttctccacatcgaggtggaaactgttggtgtagtaacctttatcggtcacgcccggcaccacgccaaactcagcagtatcgagacggcagaagcgatcgcacaggttttcactcggcgtgctgtagagactgaaaccataacccgtttcttctttccactgatccactgcctgacgcagacgttcaacaatggcgatacctttcgcgcgaagctgctcgttgtcgtaaacatgctcgccgccgaacagcgcgttaatggtttcgtggatgccgatgtaacccaggctaatagacgcacgaccgtttttgaagatttcagaaacatcatcgtcagcattgagacgcacgccacaagcaccttccatatagaggatcggggccacgcgcgctttcacgccttcgagacgagcgatacgggtcatcagcgccttacgtgccagcaccagacgttcatccagcagcttccagaaggtggcttcatcgccttttgcttccagagcaatacgcggcaggttcaggctgatcacgccgaggttgttacgaccatcgtggatctgctcgccgttttcattttcccacacgccgaggaagctgcggcagcccatcggagttttaaagctaccggtgactttcactacctgatcgtagttcaggatatccggatacatgcgcttgcttgcgcactccagcgccagctgtttgatgtcgtagttcggatcgccttttttatggttcaggccatcgcgaatcgcaaacaccagtttcgggaacaccgcagttttacggtttttaccgaggcctgcgatacggttacgcaggatgctttcctgaatcaggcggctttcccagctggtgcccaggccaaaaccaaaggttacaaacggcgtctgaccgttggcggtgtgcagggtgtttacttcgtactccagactctggaaggcatcgtagcactctttgatggttcgagagttagcgtagccttcggcgtccgggatgttccactcttctgcggtcttgcgatgtttgttgtagctggcagtgacaaacggtgccagcacttcatcgatacggttaatggtggtgccgccataaatatggctggcaacctgagcaataatctgcgcagttaccgcggttgccgtagagatgctcttcggcggttcaatctcggcgttccccattttaaagccctgggtcagcatgcctttcaggtcgatcaacatgcagttgaacatcgggaagaacggactgtaatcgagatcgtgatagtgaatatcgccacgctcatgtgcctgcaccacgtcacgcggcagcaggtgctgacgtgcatagtgtttagccacgatcccggccagcaggtcgcgctgggttggaatcaccttgctgtctttgttggcgttttcgttgagtaagctggcgttggtctgctcgaccagaccacggatctcctggttcaggcgaccgcgtttttcacgttcaatgtcgcgatcgtgacggtactcgatgtaagcacgagccagttgtttgtatggaccactcatcagctgattttcaactgcggtctggatctcattgatatccacctggttgcggccctgcatctgctcgctgacaaccgcggcaacagtggcgcaataatcggcatcatcgacttccgctgctttagctgcacgcagaatcgcttctttgatgcgctcacttttaaacggcactttgcagccgtctcgtttcatcacatgcggtgtcatgatcgctccatatttttaagaacaggttatccacagaaattgggaaaggcgttttccggttttttcgtttcgttttccggtgctttccgcaatcgccatccgcttatccacaacgccgcacctttttcgtggggagctgtagtagcaattatagtcgattaatacaacatattgggttgggacgcattttaaagtctatatatagtgctttgcatcaaggatgtttgagctttttttgatgtagctcaaagtaaaaagcagagcgtacggatgacgggcgctacagcgatatgtaaattttttaatgaatttgctggttgaaaaatcaacaaaaacaacatactgacagacaaaaccccggaatgaccggcattaccggggcttagggaagatttacttctgtaaccaccagacagcctcaaaaggccgtaaattcatggcacagggttgtggactggcttcttcgtagttatgcatcacaagctgccagttgccgcgcatttgccctgcctgccagggttggatctcacggctaaggttggcaatgaccagcaaggtttgccccttccattcacggcgatagcaccacaatacagggctgtttggcagcagatcctggtaattgccccatgtcaggatggcttcctgcttacgcagtgcgattaacttttggtaggtgtaaaacacgctggaatcatcggccagcgcggcttctacgttgatttgttgatagttatcgcccaggccaatccacggttcgccagccgtaaacccggcattatcgccgttgctccattgcatgggcgtgcgactgttgtcacgggatttactggcgaggattgccaataactcgtcggcatcacgcccatcgttgcgcagctcggcaaacatattgaggctctctacgtcgcgatagtcagtaatgcgcgtgaaatgcgggttggtcatgccaatctcttcgccctggtagatatacggcgttccctgcatgccatgcagcaccatcgccagcatttttgccgcaggcacgcggtattcaccttcatcaccaaagcgagaaacaatgcgcggctgatcgtggttacaccagaacaaggcattccatgctacgttgtgcattccttgttgccagtggcggaacaatgttttcaacgccacaaagtcaggtttagccagcgtccatttttcaccaccgggataatcgaccttcaggtgatgaaaattaaaggtcatgctcaattcactgcctgtcagagccgcgtatcgctggcaatgctcaaggctggtggaggacatttcacctacggtcattaacccgcgtggcgtaaacacatcgcggttcatctcgtgcaaaaactcgtgtgctcgtggcccgtcggtgtagaagcgacgcccgtcgccgtccaggtcttcagggaaacgcgggtctttggagatcagattcaccacatccaggcgcaacccgtcgaccccacgatcggcccagaactcacagacttttttcagctctgcgcgtaccgctggattctcccagttgagatccgcctgttctggtgcaaagagatgcaaatagtactgttcgctttccgcatgccagcgccacgcactaccgccaaatttactacgccagttgttcggtggcgtttctggttctccatcgcgccagatataaaactggcggtaagggctttctttgttcagcgcctcgcgaaaccaggcatgttgggtagaggtatggttaaacaccatatcgagaatgatacgaatcccgcggctttttgcctgcgtcaccagttcgtcaaaatcgtccagcgtgccgtaggtgggatcaatcgccgtatagttcgctacgtcgtaaccgttatcgacctggggagagacataaaagggggttagccagatggcatcaacgcccagtttatgcagatagtccaggtgttggataacgccacgtaaatcgccggtaccgctacccgtggtgtcctgaaaactctttggataaatctggtagataacgccgttttgccaccagtggggaagatgagtcattacgttattcctgcgaatgcgagggggcgcaattgcgccccgaagaaaattaaacaatgtccagcgtgcccaggcggtatttccgctgatagataaagctggtgagtacaatcgggatgatgatggcgatagccattgccagcgcaaacacctgccagtagctcggttgaatgctgagaattcccggcaggccgcctacgccgatgccattcgccataacgccgttcaggccgcatagcaatcctgccagaccagaaccaatcatcgcgcacagcatcgggaagcgatatttcaggttgatgccgtacattgcaggctcagtgaccccaagccaggcggagatagcggcaggcacggagatctcgcgttcattgtgcttgcggctggaaatgataatgcctatcacggcggagccctgagcgatattgctcagcgcaatcagcggccacactggcgtaccacccatgctttgaatcatctgcaaatcaatagcaagcgtggtctggtgtacaccggtgatcaccagcggggcgtacaggaagccaaacaatgctgcgccaatcggagcaaagctgccggtcatcaggtgacgtaccgcaaaggcaacgccatcgccaatcatgcgaccaaacggaccaatcagcgcatgggcgaggaacaccgcgaggatcaggctacagacgggtaccaccaccagatagaggtaatccggcacgatgcgtttaaggcgagtttcaataacgcccagcgccagtccggctaacagtgccgggatcacctgcgcctgatagcctactttggcgatgctgaacatgccaaagtcccacacttccggcagctgctgcccgagcagataagcgttcatcagctgtggagaaaccagtgtcacgccaagcacgataccaaggatcggcgtgccgcccatttttttcaccgcactccagcaaataccgaccggcaggtagaagaagatcgcttcaccgatcaaccacagaaaatcgtagatcgtttgcagggaagggtacatttgcgccagcgtctgaccgttgctcatgggcaaatcgccgatcacattgcgaaaaccgaggatcaaaccgccgctaatcaacgcgggcagcaacgggaagaagatcaccgcgaaatgagagatcaactgctcatgccatttcatattatgccgggcggctttttttacctgctctttatcaacctgcgcctgtccggtactcgcaatcagtgcttgatagtaatcacccacgttggtgccaatcaccacctgaaattgcccggcattggtgaaacagcctttcaccatagggagttgctcaatttctttcggtctggcattggccggttggttgaggacaaagcgtaggcgagtaatacagtggctcaccgtcgcaatattgccgcgcccgccgaccagttcaatcaaccgatcgatatccgtttggtttattttgctcatcataaagccccatggcagatgacatttttggttggctgcagaatatattgcgcggaaaaatttaaaaacgggaacgttcccgaaacgcagcgaagatcacaatttatcgttcaggaaacgatcaggacagggtggcggggatgatgatttgttgcggttcgctgcgcccggttacctgcgcgatcaactggcaagccgcctggcgtccagcttcggcgtaaccgggatctacggttacgatctccggatggaggaatttcattaacggcgtattaccgacgctcgccagttgcaaggtgtcgatgcgttgctcttgcaggtatttacttgcgccaagtgccagcgtgtcggttgcgcacagtaaggcggtagtttcaggcgtaatcacttttgcaacgttctcatagccttgcttcatagcaagccctggcagggcggcaacgggatgcagtttatgcgctttgcagaacgccaggtaggcttcgtgacgtcgcttaccggttgtcacgtcactgtgcggcacgccgagataactgatattacgatgcccctggtcatacagccgttgcatcaggattttgattgccccttcgtcgtcataacagacgctagcaaagccttttgcgtcacgcgccagcagaaccaggctactctgccagtgggctaacatttcttctgttatgccagtaaaaccgaacagcactacgccgtcgatattacgccgtttcagcactcccaaatgttcggcaactaattgcggggaaaactgactttccatcatgattgggtcgtaaccttgttcatagaacgctggcagcatggtttgaacggcgagattttcactcaagctatccagacgggtaacaatgatggcgaccactttatcgctttgcccacgcatagcgcgcgcagagcgggaaggggaaaatccatgctgattcatcactgcttcaacacgctcgcgggtgagctggctcacgccgctttcgttattcagcacccgggaaactgtagatttccccacgccgcttaagcgcgcgatatctttgatggtcagccgattttgcatcctgttgtcctgtaacgtgttgtttaattatttgagcctaacgttacccgtgcattcagcaatgggtaaagtctggtttatcgttggtttagttgtcagcaggtattatatcgccatagatgctacgaatattattggattctccttattatttgcggcgcttttttcacttaccggaggttatatggaacctgatcccacgcctctccctcgacggagattaaaacttttccggtaagcccgtcttttcacggcgttaccggatgcgtaaggccgtgacgttttaacgtccctgctcagctttattaccttcaggtaaggcttcgccacgcctgaagacatttctgtactgtttcagacagtgcggagggactccttatgtttaaagaaatttttacccggctcattcgccatttaccttcccgtctggttcatcgtgatccattgcctggcgcgcagcagacagtgaatacggtggtcccgccgtccttaagtgcgcattgcctgaaaatggcggtgatgcccgaagaagaattgtggaaaacgttcgacacccatccggaagggttaaatcaggcggaagtggaatctgcccgcgaacaacatggtgaaaataaattacccgcacaacaaccgagcccgtggtgggtacatttatgggtctgctatcgcaacccctttaatattttactcaccattctcggcgctatttcttacgccacggaagatttatttgctgcgggcgttatcgcgctaatggtcgctatttctacgttgctgaactttattcaggaagcacgttccactaaagcggcagatgccctgaaagcgatggtcagcaatactgcgacggtgctgcgcgtaattaacgacaaaggcgaaaatggctggctggagatcccgatcgaccagctggtgcccggcgatattataaaactggcggcgggagatatgatcccggcagatttacgtatcttgcaggcgcgggatctgttcgtcgctcaggcgagcttaaccggtgagtctctgcccgtagaaaaagccgctaccactcgccagccggagcacagcaatccgctggagtgcgacacgctgtgttttatgggcaccaccgtggtgagcggcacggcacaagcaatggtgattgctacaggtgccaatacctggtttggtcaactggcggggcgtgttagtgagcaggaaagcgagccgaatgcctttcagcaagggatcagccgcgtcagtatgctgctgattcgctttatgctggtgatggcaccggtggtgctgttaatcaatggttacaccaaaggcgactggtgggaagcggcgctgtttgcgcttagcgtcgcggtaggcctaacgccggaaatgttgccgatgattgttaccagcacgctggcgcgcggcgcagtaaagctgagcaaacagaaagtgatcgtcaaacatctggatgctattcagaactttggcgcaatggatattctgtgcactgataaaaccggcaccctgacgcaggataaaattgtgctggagaatcataccgatatctccggtaaaaccagcgaacgcgtgctgcatagcgcgtggttgaacagtcattatcagaccggacttaaaaacctgctcgatacagcggtgctcgaaggtacggatgaagagagtgcgcgcagcctggccagtcgttggcaaaaaattgatgagattccgtttgatttcgagcgtcgccggatgagcgtggtagtggcagaaaataccgagcaccatcagctggtttgcaaaggtgcattgcaggaaatcctcaatgtgtgtagccaggtgcgtcacaatggcgagattgtgccgctcgatgacatcatgctgcgtaagattaagcgggttactgatacgctgaatcgtcaggggctgcgcgtggttgcggtggcgacgaaatacctgccagcgcgtgaaggagattaccagcgggcggatgaatccgacctgatcctcgaaggatatattgcttttcttgatccgccaaaagagacaaccgctccggcactgaaggcattaaaagcgagtggaattaccgtaaaaatccttactggcgacagtgagttagttgcagcgaaagtgtgccatgaagtggggctggacgcgggagaggtggtcattggtagtgatattgaaacgctatctgacgacgaactggcaaatcttgcacagcgtaccacgctgtttgcccgcctgacgccgatgcataaagaacgcattgtgaccttactgaagcgcgaagggcatgtggttggctttatgggcgatggtattaatgatgcgcccgccttacgcgctgcggatatcggcatttctgtggacggcgcggtagatattgcccgtgaagcggctgatatcatcctgctggaaaaaagcctgatggtgctggaagagggggttattgagggacgtcgcactttcgccaacatgctgaaatacatcaaaatgacggcgagctctaacttcggtaatgtgttcagcgtgctggtagcgagtgctttcttgcccttcctgccgatgttgccgttacacttgcttattcagaacctgctgtacgatgtgagtcaggtggcgatcccgtttgataacgtcgacgacgagcaaattcaaaagccgcagcgttggaatccggcggatctggggcgctttatgatcttcttcggaccgatcagcagcatcttcgatattttgacgttttgcctgatgtggtgggtattccatgccaacacgccggaaacgcaaacgctgttccagagcggatggtttgtggtgggcttactgagccaaacgctgattgtgcatatgatccgcacccgccgtgtgccgtttattcagagctgtgcaagctggccgttaatgatcatgaccgtgatcgtgatgattgtcgggatcgcattgccgtttagtccgctggccagttatctgcaattacaggcgctgccgttaagctatttcccgtggctggttgcgattctggcagggtatatgacattaacccagttggtgaaagggttctatagccgtcgttacggctggcaataaagaataaactgggcacgatagccccgattcagattgtagacaaagtgagttttgttcatgccggatgcggcgtaaatgccttatccggccaacaaattcaataaattgcaggaatcacgtaggcctgataagcgtagcgcatcaggcgattttgcgtttgtcatcagacttaatccgggcatgatagcccggatttccatcaagattagcgacgaacagcgatcgcttcgatctcaatcttcacgtctttcggcagacgggcaacttcaacgcaagaacgtgccgggaaggtggcgttgtgttcggtgaagaaggcttcgtaagtggcgtttacggttgcgaagtcgttcagatcttttacaaacacggtagttttaacgatgtcgcccactttcaggccagcggcttcgacgatcgcttttacgttatccaggctctgacgtgcctgtgcagcgacgtctgccggtacttcgcccgttttcggatttaccgggatctgaccggaggtgatgatcatattgcccagatcaacgccctgtacgtaaggaccgatagctgccggtgcattttccgtcgcgatagttttgctcatgatttctcctttattacagcggtaaaaagtctggctcattatagggagccagacttttattaccaaccgcaattaattggccagcaccacattatgggaaaactctttttcacagtatttgcatttgagcgcgatatcattggcgcgttttcgcacggcaaagctggaactaaccggttcggcatggctgatacagttgctgttcgggcagaccagcacattgtcgatgcgctccggcagacttgggcggcttttacccaccacttcatagttgtcgatacggttaaccgtggcttgcggcgcatacaatgccagttgatctacttgatcttcactcaaaaaggtattttcgattttgatcagatctttgcggcccatctcgccagaaggcaggttcagaccaatggtgatgcgctgatccgtttcggtcagcttgaacagactcaacagcttaaaaccgatctgggcggggatatggtcaattaccgtgccgcgtttaatagcttcaacctgcaatttattatcgtgtgtcatctctatttccccttacagtaccagatcgcgattcagaaccagtgccagtaacgcctggcgagcgaaaatcccgttgcctgcctgctggaagtaccaggcgtgtggcgttttatcaacatccgtcgcaatctcatcaacacgcggcagcggatgcagcactttcatattggctttggcgttgtggagatcgctggcgcgaagaacaaactgcgctttcacgttggcgtactcggacgggtccagacgctctttttgcacgcgggtcatgtacaggatgtctacttccgccatcacttcttcaatagagctgtgcagactccatgcgatccctttttcatcgagcatatccagaatgtattgcggcattgccagcgcgtccggcgcgatgaagtaaaaacggttgccgtcgaacttcgctaacgcctgagtcagggagtgaacggtgcggccatatttcaggtcaccaaccattgcgacgtggagattgtccagacgcccctgggtttcctgaatagtgaataagtccagcaaggtttgcgtcggatgttggttggagccatcaccggcattcagtaccggtacattgccggaaaactcggtggccaggcgcgccgcaccttcctgcggatgacgcatcactatcgcatcgacgtaagtgctgataacgctaatggtatcggccagcgtttcgccctttttacccagacttgtattggcgctgtcggagaagcccaccacgctggcccccaggcggtgcatagatgtttcgaaagagaggcgggtacgggtagaggcttcgaagaaacagctggcaatgactttgtgcttcaacagctctggttgcgggtttgctttcagtttcgccgctgtcgccagcaccagattaaggtcatcgcgactaaggtcgtttatggaaatgatatgtttctgatatagcggattagccatcttttatctcctgacgcctgggcaaaaaaaagcccctcgattgaggggctgggaatgggtgatcaacgggaagaaaaacggcaggccagcgtcttttttcagacgcggtaagacaaaatgtcgaacacactgaaccatacatcctcccggcaaattgtccggcattatactcatcgtcagaagcggcgcaagcatttgatgcaatattttgtcagcgcaaacggtttatttgaattaaaagtcaaggtatatgcatttttatttgatgtgattctgcaggggaactgtccttcggtatcaataattgcagacattccctgctttttcctttttcactttcacgcaatcagatatgcattttattccattcatccgacttatagggcggagtgtgaaagcgaacggctaacactattgcttactgctcagggatgcgcgctatcactttaatttcaaaatcaaagcctgccagccatgtaacacccaccgccgtccagtttggataaggtggggcgctaaatatttcatttttcaccgtcatgatgtcttcaaattggttttctggatcggtatggaagctcgtaacatcaatgatatcgtcaaaagtgcatcccgcagctgccagggtcgcatgcaaattatcaaatgccagtctgacttgttgctgaaaatcgggttctggtgttccgtcctctcgacttcctacttgcccggaaacaaacagcaaatcgccggaacgaatagccgcagaataacgatgctcagcatatagactatgtcggccagcagggaaaacagcggttctttctaccatttggttatcctcaagatttacgacatgaacagaagatttctctttaccgggagccgcttttagcggacgacgtgagtaaacaaaacccagacatcatggataatggctgggcttaattgagcgtagtcggttatgcgccaaacgcgccatcaatggtatgcatcgcgccggtaacaaaactggcttctggccctgctaaccatgcgaccataccagcgacctcttccggttgcccatgtcttttgatagccatcaaactatgcaacatatcgcgcattggcccgttggcgggattagcgtcggtatcaattggccctggctggacgacgttaatggtgatcccacgcggtccaaaatcacgggccagcccgcgcgccatgccttgcagggcagatttgctggcggcataagcagccatgcctgcaacaggcatacgatcgccattcacggagccgatgattaagatgcgcccgccttcgggcatctgccgggcggcttcaacagaggcatgataaggagcatgaatattgattttgaaaaggcgatcaatatcgtcggcatttaattccagggcctcgccaaagacgccaatacctgcatttaccaccaggatatccaatgcgccgctcttacgaacgacatcaatgacagcgtctctgtcagcactatctgtgaatactgctgtcgctccagtctcttgtgccaggcgtttagcggcatctttgctccccgcataggtgaatcgtacattggccccatcggtgacgaaacgacgtacgatagcggcaccgataccacgactgccaccgaggatgagaactgtcttacctgtaaaagcgcccataaggactccttgatttattatgtaacatgcattacaaaactgttttaactttctgtcaacaggttttgtaatggtcactaaaaaacaatctcgcgttccaggtcgtcccagacgtttcgctcctgagcaggcaatctctgcggcaaaagtgctttttcaccaaaaaggtttcgatgctgtcagtgttgctgaagttactgattatcttggtattaaccccccgagcctctacgcggcttttggcagtaaagctgggttatttagccgtgtactcaatgaatacgtcggtacggaagctattccgcttgccgatattcttcgtgatgatcgtccggtaggcgagtgcctggttgaggtattaaaagaagcggcgcgcagatatagccaaaacggcggctgcgctggctgtatggttcttgaaggtattcatagtcatgatccacaagcgcgtgatattgccgttcaatattatcacgccgcagaaacgaccatttatgactacatcgccaggcggcatccacaacgcgcacaatgtgtgactgattttatgagtaccgtgatgtctgggctttctgcgaaggcacgagaggggcactctatagaacaactctgtgcaacagctgcaatggcgggggaagcgataaaaactattcttgaggagtgatgcgggccttgacccgaaaggcgggaaagcgcctgccgataagttgtgataagacaataattcacgcgttaaggctagcggaattgattatcttttcgtataacgatagaaatgaaacgttgttttaattaaggagtggaaaagatgatcatcggaaatattcataatcttcagccgtggctaccccaggagttacgccaggcgattgagcatatcaaagcacacgttacggcagaaacgccaaagggcaagcacgatatcgaaggcaatcgactgttttatcttatcagcgaagatatgaccgagccgtacgaagctcgccgtgcggagtaccatgcccgctatcttgacattcagattgtgttaaaaggtcaggaaggcatgaccttcagcacgcaacctgcaggcgcgccggataccgactggttagctgataaagacatcgcatttttgccggaaggcgttgatgagaaaacagttattctaaatgaaggtgattttgttgtgttttatccgggggaagtgcataaaccgctgtgcgcagtgggcgcgccagcccaggttcgcaaagcagtagtgaagatgctgatggcgtgatgacttttcgccgtaaataactcaaggtttacggcgagtttgtgaaaagagcgttttttgatatttttttgtgagtaaaatttgtaatgcttagacgttcttattcactcaaggagttcgtcatgagcaaaataagtgatttaaattattctcaacacattacattagccgacaattttaaacaaaaaagtgaagttttaaatacctggcgtgttggaatgaatgattttgcccgtattgccggggggcaggataacagaaggaatattctttctcctggagcatttttagagtttttggcaaagatatttaccctgggttatgtggattttagcaaacgctccaacgaagcgggtagaaatatgatggctcatattaagtccagttcttattctaaagatactaatggcaatgaaaaaatgaagttttacatgaataatcctgtaggggaacgagcggatagtcccaaggtgattatagaaattagtctttccactatcactactatggggactcgtcaaggacatacagccattatatttccacaacctgatggtagcactaaccgttatgaagggaagtcctttgaaagaaaagatgagagtagtttacacctgattactaacaaggttctggcgtgttaccaaagtgaagctaacaagaaaatagcgcgtctattaaataataatcaggagttaaataatctacagaaattaaataatctacagaagttaaataatctactgaagttaaataatatacaggggttaaataatcctcaggagttaaataatccgcagaatttaaatgattctcaggagttaaataacagccaggaattaaatagtccacaggagttaaatgatccgcaggagttaaataattctcaggacttaaataactctaaggtgagttgtacagttagtgttgattctacgattacgggtttattaaaagaaccattgaataatgcattattagcaataaggaacgaacatctgctattaatgcctcatgtatgtgatgaaagcattagttacttactgggcgaaaaaggtatacttgaagaaatagataagctctacgcattaaatgatcacggaattgataatgacaaagtaggtaacaatgaaattaatgacatcaaagttaacctgtctcatattcttattgattccttagatgatgcaaaggttaaccttacaccggtcatcgatagcattctggagacttttagtaaatccccatatattaatgatgtaagaatactggattggtgttttaataaaagcatgcaatattttgatgatactaaaaagataaagcatgcatgctccgtaataaatcatattaatcttcgcagcgatcagtctaaaatagctgagacattatttttcaatctcgataaagaaccctataaaaatagccctgaattacaggggttgatttggaataagttggttgtatatgtcaatgaatttaacttaagtaatcgagaaaaaacaaatttaatacaaaggctatttgataatgttgagtctatatttaatgaagtacctgtcagcattttagtgaatgatatttttatgaatgatttctttatgaaaaatcctgagatgattaattggtacttccctcagttacttaagagttatgagggtgaaaagatttattttgataatttaaaatatgatttaaatgataatgataaggaatctaataaagaaattttgaagaatcaaccagataatgttatcaaagaaaaactgaataatgaatacaaacttagatttagaatgatgcaaactatcttgcaaagcagagttaatgtattaccatatattaatgaacagcgtttaaataaactaaatccaccggaaaatttacgtatagcaatagaacactttgggtggaagaatagacctatcactgcataaaataatgtgatgccgggatggtttgtatttcccggcatctttatagcgatagcaattatttactgagcgtcgcgaccatcaccgctttgatagtatgcatacggttttccgcctgatcaaaaacaatgctggcggcagattcgaagacctcatcagtgacttccataccgccatgtaggccaaattcttccgccattttcttgccaagcgtcgtttggtcgtcatgaaacgcgggcaggcagtggaggaatttgacctccgggttaccggtcaactgcatcatcttgctgttcacctgatattcacgcagcaatgcaatccgttccgcccatttctcttttgcttcccccatgctcacccacacatcggtatagataaagtcagcaccttcaactcccttcgcgacatcttcagtcagcgtaatattcccaccattttgctgtgccagggcgcggcattccgtaaccagcgcagcttccggccagcacgcttgtggcgcgaccagacgcaaatccagaccggtaagcgccgcagcttcgagcatgctattgcccatgttgttacgcgcgtcacctgcatagaccagcgtcatttcgttgaacgctttgccgggcaaatgctcctgcatggtgagaagatccgccagcagctgcgtgggatggaactcattggtcaggccattccataccggcacgctagcgtattccgccagtgtttcgacaatctcctgaccatagccgcgatactgaataccgtcatacatgcgaccaagcacgcgggcagtgtctttaatgctctctttatgaccaatctggctgccgcttgggccgagataagtaacgcgagcaccctggtcatatgcggcaacttcgaaagagcatcgggtacgagtgctgtctttttcgaagatgagcgcgatgtttttaccagtgagtttggcttcttctttaccgcttttcttatcggctttcagcttcgcggctaactgcagcaggctgttgagttcagctggcgtgaaatcgagtaatttcaggaaatgcttatgataaaacccggacatagatccctcctgtggctaacgcctcaatgaattaaaattcaatttatatggatgattattcatttgcaagtctaaagcataaatctttgtcacaaaggtggaggcaatgtcagtggtgtgtgacaataagagtatcggcaggacattaagaggaatgagccatggcaaacccggaacaactggaagaacagcgtgaagaaacacgtttgattattgaagaattactggaagatggcagcgatccggacgcgctgtacaccatcgaacaccatctttccgcagacgatctggaaaccctggaaaaagcagcagttgaagcgtttaaactcggttacgaagtgaccgatccagaagagctggaagttgaagatggtgatatcgtgatttgctgcgacatcctcagcgagtgcgcgttgaatgccgatctgatcgatgcccaggttgaacaactgatgacgctggcagagaaatttgacgttgagtacgacggatggggcacttactttgaagatcctaacggcgaagatggcgacgatgaagattttgtcgatgaagacgatgacggagttcgccactaattaagcgtagcgcatcaggcccaggtagttcctgcaacctggtgaatttgtagcccggataaggcattcatgtcacatccggcataaacaaaacgtacgttgttaatgttcgaatgcccgcgagttgaacacgcgggcatttttttagagttcgcgcaacatccgcacttcacaatcgacatggcccgtgcagccaagcgcatagtcgatatgctcaaagcccaaatgctcataaagcgcaatggcttcctttaaaaaagcggtcgtttccagatagcagcgtttgaaacccatctctcgcgcctgctccatcgccattaaggccagtttttttgccagccctttgccgcggatagccggaagaaaatacatcttttgcagttcgcaaatatcgctctcactcccggttaatggcgctatcccaccgccgccgaccacttcaccctcgtactcaacgacccaatatgcatggccaggctgactatatacttgatacagctcgtcaagattcggatcggcgacggtgtagcctttatcagcggtaagaccgtattcggcggatacctgacgaatgacgcgggcgatagcaggattatcctgcagcgtcaggcgacgcattacaggactttgcggcgcaatgttattcatagtttaacccaataaaaataaagtaattatacatttgtttaataccactctcttcttacgtacgcaagcgacttataaagtaataaagtttttgccagcctattactgataagagtattgtaacgtggcagaacattttactgtctgtatatataagttatatcaatggattttttaattcagggaatttttatggctcaagttattaatgaaatggatgttccgtcccatagctttgtttttcatggtacaggtgagagatattttcttatttgtgtggtgaatgtgttgttaacgattataacgctaggtatctatttaccatgggcattaatgaaatgtaagcgttatctttatgctaatatggaagttaacggacaacgattttcttatggaattaccggtgggaatgtttttgttagttgtcttttttttgtttttttctatttcgcaatcttaatgacagtgagtgcagatatgccgcttgttggttgtgttttgactttgttactgttggttttgcttatatttatggcagcaaaaggactgcgtcatcaggccttaatgaccagtctcaacggcgtaagatttagttttaattgctctatgaaagggttctggtgggtgacctttttcttgccgattttaatggccattgggatggggactgttttctttatcagcacaaagatgctacctgccaatagtagtagtagtgttattatatccatggttctgatggcaatagttggtattgtttccattggtatttttaatggtactttatatagtctggtaatgagttttctctggagtaataccagtttcggtatacatcgtttcaaggtgaaattagatactacgtattgtataaaatatgccattctcgcatttttagctttattgccttttctcgctgttgctggttatattatcttcgatcaaatattaaatgcgtatgatagttctgtatatgcaaatgatgacattgagaatttacagcaatttatggaaatgcaacgtaaaatgataatcgcgcagttaatctattattttgggattgctgttagcacaagttatttaacggtgtctttgcgaaaccattttatgagcaacctgagtctgaatgatgggcgtattcgttttcgcttaactttaacgtaccacggtatgctttatcgcatgtgtgcgttggtggtgatatccgggattacgggcggtctggcttatccactgctgaaaatatggatgattgactggcaggcaaaaaatacgtatttgctgggcgatttggatgaccttcctttaatcaataaagaagaacaaccagataaaggcttcttagccagtattagtcggggagttatgccttctttaccatttctgtaagagataaaaaaggccggagcatgctccggccttcgttttcatcactgtgttttgattacagcgcggcgataacagcctgctgttcaatcagtttcgctttcgcttccgcatagccttccagcttctcacgctctttcgcgatgaccgcttccggtgcgcgggcgacaaagccttcgttcgccagtttgttctcgatacggctgatttcaccttcaatcttcgccacttctttcgccagacgcgccagctcatcttctttgttgatgaggccagccatcgggatcagcagctctgcaccgtcgatgatcttcgtaacggaaaccggacctttgtcatcggcaggcagcacggtgatactttccagacgcgccagggtttgcaggaagccacggttttcatttacgcgacgttctgcatccgcgctgcaaccacgcagcagcagctccagcggtttgcccggcgcgatgttcatttctgcacggatgttacgtaccgcaacgatcgcctgtttcagccattcggtgtcggccagtgcggcttcatcaacctgagatgcatcgtactgcgggaacggctgcagcatgatggtgtcggcagtgataccgcaaagtactttcacacgctgccagatggtttcggtgatgaacggaatgatcggatgcgcgaggcgcagcagaccttccagtacagtcaccagcgtatggcgagtaccgcgcagttctgcttcggtgccaccgttcattaccggcttggtcagctcgagataccagtcacagaactggttccaggtgaactcatacagaatgcctgcggcgatatcgaagcggaagctgtccagcgcttcgcggtacgctttgatggtctggttgaactccgccagaatccagcggtccgccaggctcagcgtcatttcgccgccgttgaagccgcaatcctgaccttctgtgttcatcagcacaaagcggctggcgttccacagcttgttacagaagttacggtaaccttccagacgcttcatatcccagttgatgtcacgaccggtagacgccagcgccgccagggtgaagcgcagcgcgtcagtaccgtgcggctcaataccgttcgggaactgcttctcggtgcgcttacggattttgtccgccagctgcggctgcatcatattgccggtacgtttttccagcagttctggcaggctaataccgtcaaccatatccagtgggtcgataacgttacccttggatttggacatcttctggccttcgtcatcacgaatcaggccggtcatgtaaacggtgtggaacggcacctgcggtttgccattttcatctttgatgaagtgcatggtcatcatgatcatgcgggcaatccagaagaaaatgatgtcgaaaccagataccatcacgctggttgggtggaactgacgcagggcgtcggtattttccggccagccaagggtagagaaggtccacagcgcagaagagaaccaggtatcgagaacgtcttcgtcctgacgcaggacaacatcagcaccgaggttattttctttacgcacttcgtcttcgttgcggccaacataaacgttacccgcttcgtcataccatgccgggatacggtgaccccaccacaactgacgagagatacaccagtcctgaatatcgcgcatccaggagaagtacatgttttcgtactgcttcggtacgaactgaatgtcgccgttctcaaccgcttcaaccgccggtttcgccaggacatcggcacgcacgtaccactggtcggtcagcattggttcgataactacgccgccacggtcgccgtaaggaacggtcaggtcgtgcggtttaatttcttccagcaggccaagcgcgtcaactgcggcaacgactgctttacgtgcagcaaaacgctccagtttctggaactctgcagggatttcgctggaataaacgtcagattcgttacctttggtatcgaacacctgggcgctttcacggatatcgccgtcaaaggtcaggatgttgatcatcggcagggcgtgacgtttacccacttcatagtcgttaaagtcgtgcgccggagtgattttcacgcagccggtgcctttttccatgtcggcgtgttcgtcgccaacgatcggaatacgacggttaaccagcggcagaatgacatatttgccaatcagatctttgtaacgcggatcttccgggttaacggctacgccagtatcgcccagcagggtttctggacgggtagtcgcgaccaccagataatctttaccgtctgcggttttcgcaccgtcagccagcggatagcggatgtgccacatgctacctttgctttcgcggttttcgacttccaggtcagagatagcggtgcgcagtttcggatcccagtttaccaggcgtttgccacggtaaatcaggtcttctttatacagacgaacgaaaacttctttcaccgcattggacaggccttcgtccatggtgaagcgttcacgctcccagtcgacggagttgccgagacggcgcatctgacgggtaatggtgccgccagattccgctttccattcccagattttgtcgatgaaagcttcgcggccgtagtcgtgacgggttttaccttcttctgcggcaatcttgcgctcaacgaccatctgggtagcgatcccggcgtggtcagtaccgacctgccacagggtgtttttgccctgcatgcgctgatagcggatcatggtatccatgatggtttgctggaaggcgtgacccatatgcaaactgccggtgacgttcggcggcgggatcatgatgcagaaactttcctggctttcatcgccattaggcttaaagtagccctgcttttcccagtgctcgtaaagcggctgttcgatatcttgtgggttatatgtcttttccattatttccaggttgccgtattcaggttgaaaccagccacgcggtaggctttatagcgttcgcgcgccagttgtttcagagaatcttcataaggaacgaagtctaccacttctgtgaaagcggtggcaaaatctgcaaagcttgttcgcagactaatcaatatatcgcgccggctgctgctacgcttttgcggccaggcgatctccaccggtgcaccgccgcgcggtccttctcccgctaaattatgcggaacaaagctttctgccggacgcgcccacagggcttcatccagccggtaagcctgcttttcatcttcacaggcgatgagcacgcgcttaccgctgcgccaacgttctgcggcaatttcacacaccagttgctcaacggcgcttaagccatcgacggtggtgtcattgtccagaaggtagaacgtcgcgtttttcataaatggggcttcttgtggtggatttaaatacgcatcaggtatacaccgcagcgcctgatgcgacgctgttgtgtcttatcaggcctacgagttcagtgctgtgtaggtcggataaggcgttcacgccgcatccggcaataacagccttgcctgacgcaattactcttcgccgttaaacccagcgcggtttaacaggaactgtgccagcaacgctaccggacgaccggtggcgccttttgctttaccagaacgccaggcggtaccggcgatatccaggtgcgcccagttgtacttacgggtaaagcgactcaggaagcaacctgcggtaatcgccccaccaggacgaccgccaatgttcgccatatcggcaaaattggactccagttgttcctgatactcgtcacccagcggtaagcgccatgcgcggtcaccggattgttcagacgcggcaatcagttcatgggccagcggattatggttcgccatcagaccagtaatatgatgacccagcgcgatcacgcaggcaccggtcagcgtcgccacgtcaatcaccgcttccggctcaaaacgctcaacgtaagttaacacgtcgcacagtaccaggcggccttcagcgtcggtgttcagcacttcaacggtttgaccggacatggtggttaacacatcgcccggacgataggctcgtccgccaggcatgttttcgcagcctgccaacacgccgataacgttaatcggcagttgtagctccgcgaccatccgcatcacgccgtaaaccgctgccgcaccgcacatatcgtacttcatctcatccatgccttcactaggcttgatgctgataccgccggagtcgaaggttaaacctttacccaccagcacgattgggcgtgcatcttcgctcgcgttgcctttgtactcaatcacgctcatcaggctttcgttttggctaccctgaccgaccgccagataggaatgcatccccagctctttcatctgctgttcgccgataacgcgggtgatgacattcttgctgtagctgtcagccagctggcgcgcttgactagcgaggtaagcggcgttacagatattcggcggcatattgccgagatcttttgctgctttaatcccggcggcaatcgccagaccgtgctggatcgcgcgctcaccgctggtcagttcacggcgggtcggcacgttgaacaccatcttacgcagcggacgacgcggttcgctcttgttcgttttcagctgatcgaaactgtagagcgtctcttttgccgtctcgacagcctgacgcactttccagtagttgttacggcctttaacgtgcagctcagtcagaaagcagaccgcttccatactgccagtatcattcagcgtattaatggttttctgaataacctgcttgtactgacgctcatccagctcacgttctttgccgcaaccaataaggagaattcgctcggaaagtacattcggaacatggtgcagcaacaatgtctgccccggttttccttccagttcgccccgacgtagcagggcgctgatgtacccatcgctgattttatcgagctgttctgcaatcggagaaaggcgacgtggttcgaagacgcccacgacgatgcaggaactccgctgtttctccgggctaccgctttttacactaaactccatgcactacgctcctgaatcttaaagacaacggcggtggctacagatagaattgcaagctttcgtaactcatgtccgctgttgcgatgacttcgtgttaatcttaacgttattacggcattggcacgtcagaacaaaatctgagaggtgaatccgttgagtataattatcttagcgacgatttcgacgactcaagagaataaatgacgtttaagccatgaaacaagctaaaatcctgcaaaagacgagtttttacgggcgtatttaaagtgataatcataagatatctggtgcgggagacgctcaaaagccagctggcgatactcttcatcttgcttttgatcttcttctgtcaaaagttagtgaggatcctcggcgcagcggttgacggcgatattccggcgaatctggtgctctcccttctcgggttgggcgtgccggaaatggcgcagcttatcctgccattaagcctgttcctcgggctgctgatgacgctgggcaaactgtataccgaaagtgaaattacggtaatgcatgcctgcggcctgagcaaagcggttctggtgaaagcggcaatgatccttgcggtattcacggcaatcgtagcggcggttaacgtgatgtgggcgggaccgtggagtagccgtcatcaggatgaagtgttagcagaagcgaaagcgaaccctggcatggcggcgctggcgcaagggcaattccagcaagcgactaatggcagcagcgtgctgttcatcgaaagcgttgacggcagcgatttcaaagatgtgttcctcgcgcaaattcgaccaaaaggtaatgcacgtccttctgtggtggtggccgattccggacatttaacccagctgcgcgacggctcccaggtcgtcactctcaaccagggaacgcgcttcgaaggcactgcattgttacgtgatttccgcattacggacttccaggattatcaggcgatcattggtcaccaggcggtggcgctcgacccgaacgataccgaccagatggacatgcgcacattgtggaacactgacaccgatcgtgctcgcgcagaactgaactggcgtatcacgttggtattcaccgtgtttatgatggcacttatggtcgtaccgctgagcgtggttaacccacgtcagggacgcgtactgagcatgctgccagccatgctgctgtatctacttttcttcctgatccagacctccctgaaaagcaacggcggtaaaggtaagctggacccgacgctgtggatgtggaccgttaacctgatttatctggctttagcgattgttctcaacctttgggacaccgtgccggtccgccgcctgcgcgccagttttagccgtaaaggagcggtgtgatgcaaccttttggcgtacttgaccgctatatcggtaaaactattttcaccaccatcatgatgacactgttcatgctggtgagcctgagcggcattatcaagtttgtcgatcagctgaaaaaagccgggcaggggagttacgacgcgttaggcgcaggaatgtataccttgctgagcgtgccgaaagatgtgcagatcttcttcccgatggcggctctgcttggggcgttgcttggtcttgggatgctggcgcagcgcagcgaactggtggtgatgcaggcttctggttttacccgtatgcaggtggcgctgagcgtgatgaaaaccgccattccgctggtcttgctgacgatggcgattggcgaatgggtcgcgccgcagggcgagcagatggcgcgtaactaccgtgcgcaggcgatgtacggcggcagcttgctctctacccagcaaggcttatgggcgaaagatggcaacaacttcgtctacattgagcgggttaaaggtgacgaagagttaggtggcatcagcatttatgcctttaacgagaatcgtcgtctgcaatccgtacgctatgccgctactgcgaagtttgacccggaacataaagtctggcgtctgagccaggttgatgaatctgatctgaccaatccgaaacagattaccggtagccagacggtgagcggcacctggaaaaccaacctcacgccggacaaactgggcgtggtggcgctggacccggatgcactctctatcagcggtttgcacaactatgtgaagtatctgaagagcagcggtcaggatgccggacgttatcagctcaacatgtggagcaaaatcttccagccgctatctgtggcggtgatgatgctgatggcgctgagcttcatctttggcccactgcgtagcgtaccgatgggcgtgcgtgtggtcaccggtatcagtttcggttttgtcttctacgtactggaccagatcttcggcccgctgacgttggtttatggcatcccgccgatcatcggcgcactgttgccaagcgccagcttcttcttaatcagcctgtggctgttaatgagaaaaagctaaccgaatgaacgaataaagggagcgaaagctccctttattattgttagcaaagtgtgcttcgttcattcctgaaaaataattaaaattcaatatattgcagtggggtgggcatgataagacgcgccagcgtcgcatcaggcaaagacaaatctcgcctgacttaccttcttctcccccccagcaaactccccaacatcccgcgtacaatctgattcgtcacttggcgagcggcgcttttggccattgtttgcaccacaccatctttcttcccgccgcgtggtccggtagtgccgaacaaaatatccttcaatccaccaagaatgccgtcatccaccgctacctctttccctttcgcgggaggattattttgctgctcggtactggcctgaaagcctttttgcaacatctcataggcggattcccggtccacctcatcctcatatttgccatacaccggagagtgattaatcaagccattacgctcatcttccgtcaccggccccatccggctacaaggcgcgatcaccatcgcacgctccaccacagaagggcttcctttcgcatccagaaaagagatcaacgcctcgccggtgcccagttcctgaatcgccttttcggtatcaaacgccggattggcccgcatggtttgcgccgctgccttcactgctttctgatcttttggcgtaaaagcccgcaaagcatgttgaacgcgattaccgagctgcccgagcacattatccggaatatcagacgggttttggctaacgaaccagacgcccacgcctttactgcgaataagccttatcacctgctcaatcttatccagcagtacctgcggggcatcgttaaacagcagatgtgcctcgtcgaagaaaaacaccagttttggtttctccagatcgcccgcttccggcaattgttcatacaactcactaagcatccacagcaggctggcggcgtacagtttcggcatctgataaagtttctcggcgctgaggatattgataacgcctttaccgttggcatcggtgcgcatccagtctttgatatccagcatcggctcaccaaagaagtgtgctgcgccttgctgttccaggctcaacagcccgcgctggatggcaccaacgcttgcgctactgatattaccgtactgattctggaaggatttggcgttatcgccgatgtactgggtaattgcccgcagatctttaaagtcgagcagtaacagcccctgatcgtcagcaatgcggaagatgatattcagcacgccagattgcacatcgttgagattcaacagtcgtgccagcaacagcggccccagatcgctaaccgtcgcccgcaccggatggcctttctcgccaaagatatcccacaccaccaccggattggcatgcggttgccagtcattgacgccgatatttttaagccttgcgagcagtttttcgctcaccgttcctgcctgcgcgacgccggtcagatcgcctttcacatcagccataaacaccggcacgccgatttcgctcaaactctccgccagtttttgcagcgtaacggttttacccgtccccgttgcgccggtaatcagcccatgacggttagccattcccggcagtaaaaacagttctgtgtccggcgtgcgggcaattaacaggggttcactcatgagatatcctccagtttcctgcctggagtataggcaacgtccggcaaagagaatacgtgtaatgaagagaaaataacttaaagcgtgttgccgtgataaatctgatacccgaggtcaacagtgttgtggttgtgatcgttatttttaattttgctcagcaacatttgggcggccatccgaccaatatcaaaacggggagtaattacgctggcgaggcttgggatcatttgcctgccaatctccagcccatgaaaacccgcaatggaaatttgttctggcacggcgaggtttcgctcgcggcacagcagaagcgcacccatcgcaatatcgtcattggtgcaaaatacaccgtctaaatccgggtttgcgctaagggcatcacgcattaactgcattcctaaatgaatggaactgatggcgcgtggattcatgcgtaatggggaaagattatgcagcatcatcgcatcgcaatacccctgataacgctgttcatcgcgggtgtcatctttggaaccgagatacagaattttgtgcctgactcgcttctccagcatggtacacaccatgtcaaaagcggcctgccgattatcaaaaccgacctccatatccagccgttctccctgtacatccatcaattccacgaccggaatggtggcactacgcagaaatttcaccgtcctgatggtgtgatatttttcgctaagtataatcccgtcaatgttataagagagcaggttaatcacgctctcttcttcggaatcgcgatcgtaattgtaattagcaataagggtctgataattatgctcagaggtgacggattctattcccgcgagaatgtcagcgaagagttgattttgaaaactcggaatcaagataccgagggtataactttgtgcattcaacaacatgccgggagcgcgattagggatataattgatctcttccataattttggcgatgcgctcgcctgtttcctttgccacctttttcgggctgcggatataacgactcacggtcatttttgttacgccagccagcgtagcgatatcctgtaaagaaattctgtgattgcgcataacttctcccaacgtcgggggaatcttcaatcttcccccgaaactacatcacaatattttattctttcagtgcaatacggcgttaatggctaacacgcccagcaaacccataatagaaataagggtttccatcaccgtccaggtacgcaacgtttcaccaaccgtcagattaaaataccctttaaatagccagaagccagggtcgtttacgtgactcgcgatcacgctgcccgcaccggttgccagtaccattaaagcgggatcggcatgggtaacgttgataatcggcaacaccacacccgcggtggtaatggccgcgacggtggcagagcccagagcgatacgcaacagcgccgcaacagtccagcacatcaataacgggctaagtgtagttccggtcattaagtgactaatatagtgcccgacaccgctatctactaatacctgcttaaacgcgccgccgccagcgataataaacacaatcatcgcgatagcgcctatagaatccccaatgatatccatgatttgctcgatggtgcgtccattacgtcggcccagtgtgaaaatcgcaataacaatggcaataaacagcgcaacggcagggttaccgacaaattcaaagaagaggcgcacggtgttagttttcggtaacgtaatttcacaaacggcggcgatagccatcaggatgaccgggatcacggcagcgaaaatactgttccagaaggagggcatctcctcttcgctaaacagatgaggattaaataagccttccggtggtgctttctcaaagcgagttagcagtttagaaaacagcggtcctgcgacaataactgtcggaatggtaatgataaatccatacagtaaagtcgttccgagattagcctcaaagatagtcgcgatggcagtaggccctggatgtggcggcagaaaacagtgggttacagagagcgctgctaccattggtacgccaacatacaacaggggtaatccactacttgctacgatggtaaataccaacggcaacagcaggacaaaacccacttcaaaaaacatggcgaggcccacaaccagaccggtgatcactagcgcccattgcacgcgttttttaccaaaagtagcaatcagcgtagtggcgatacgttgtgccgcacccgtatcagaaatcagcttgcctaacatggccccgaaaccgaggatcattgccagcccgccgagcgtgctgccgataccattttgtatagagtgcaggacggcctgtgcatccatcccttcggcaaatccgacgacggcagctaccagaacgagggcaataaagccgttaactttaaagccgatcatcaggataagaagcagcgcgacgcctgccgcaataatgattaatggcatagtctttatctcttattagtgccagaaaagcagcgctttcgcgctgcacgtaggggggctgttaaacagccactaacatgccgccatcaacaaacaacaggtggccgtttacgaaatcagaggctttactagaaaggaacaccgcagcaccaatcagttcctgcggatctccccagcgtgcggcgggggtccgtttgcacaaccaggcggtgaaggcttcgtcctcaaccagtgctttagtcatttctgttttgaaatagcccggcgcaataccgttgacctgaatattgtggcgcgccagctcgacgcacatgccgcgggtgagcatttttaccgcccctttgcttgcggcataaggggtgatggtgtcacgtcccagttcgctttgcatgctgcaaatattaataactttacctgccttgcgttcaaccatgtgacgagttaccgcttggcttaccaggaacacggcggtctggtttactgcgatcacatcattccactcttgttcagggaactcagtaaaaggatgacggcgctggataccggcgttattcaccagcacatcaatggggccgatgtccttttcgatatgttcaacggcggcatcaatttcatgtttatgagtaacattaaaaggtgcggcaacggcctgaataccctcctggtggagtttttctacagcaagttctgcgcgttcggcagtaatatcattaataattatttgtgcgccatatttacccaggccggttgccagtaaaaagccaatgccctgtgcactaccggtaatcaagatattttttcctgccagactaaatagatcgttcattgtattattcctttatttatctcttagaaaacaagctggacttttgctgcctgggttttatcaccggcgaaacgtagcgcctcttccaggtcagtgaagggatattcagcactcagtaaaggcagtggattgataacgccattcgccagccaactcactgcggtattaaattcgctggtaaaacggaaagagcctctgagactaatctccttaccaatcaacgtcatcattgggaattctgccatcgcgcctcccatacctacctgcaccattacgccgcgtgcacgagtgacctccagacaggtattcacactactaggatgaccggacacttcaaagctgacatcgaaatagcctttttccgctttccagtgatccatgtcgtcgttttgtgggtttacgagcacatccgcccccatctctttgcccaggctaagggaacggggactcacatcagcacagacaatttccgcggcccccagtgttttcactgcactgacaatcaggcagccaatgggtccaacaccggaaataaatactcgcttgccctgtaactcgccggcctgatgtgcggcatgaatcgcgacggctaaaggttcggcaaaagccataaccttttcgtcagctttggccggataagggacacattggctcgtttcgaccattttataacgggtaaaaccaccatcaacatgagggaaatacatggcactgccaaaaaaacgcatatctgtacactgattctcgttatgttcaatgcagtatttgcagtgaccgcacggtttagacggattaatggctaccgtttgcccttcatgtaattcactactgtcgctatgaataactttaccgataacttcatgacctaacaccatcggtgcctttatcatgaaattacctacttttccttcctgataataatgtaaatcggaaccgcaaattccacctcgggttatttgtactaatgttccattattattccaatctatcgtctgctcggtaacggcaacagttttcttgcccgcaacaacgcaggactgtgttttcacttgcataaattcctcactggtcaggtagacacctcggaagcatttaagcggttttaactgtcattatttgtgatgaagatcacgtcagaaaattgttacattactatgttacgcataacgtgatgtgccttgtaattcttatcagtagaaataaaaaaacgtgaaattattatgccgccaggcgtagtatcgcagcaggtaagatgattcaggagattttaaatggcgggtgaaagctttattttgatgggcgttagtgggagtggtaaaacattaattggtagcaaggttgccgcgttattatctgctaaatttattgatggtgacgatcttcatccagccaaaaatatagataaaatgagccagggtattccattatctgatgaagatcgacttccctggctggaacgcttaaatgatgctagttacagtctttataaaaagaatgaaacaggatttattgtctgtagtagtttaaaaaaacagtatcgtgatattttacgcaagggtagcccccatgttcatttcctctggttagatggcgactatgaaactattctcgcgcgaatgcagcgtcgggctgggcattttatgccggtagcgttactaaaaagtcagtttgaggcactggagcgtccacaagcagatgaacaggatattgtgcgcattgatatcaaccatgatattgccaatgtcaccgaacaatgtcggcaggctgtgctggcgatacgacaaaacagaatatgtgcgaaagagggcagcgccagtgatcagcgctgcgaatgattttcaaaaatcggctttcaacaccacgcggtaacgcgccttaccgtcgcgcacatgctggatggcgtcgttaattttgctcatcgggaacagttcggtggtcggcgcaaccttgctgcgggcggcaaaacgcatcagcttacgcagctcataaggcgtgccggtagcagaaccagagacgctgcgatcgcccgcaattaacgtaaaggccggaacagacagcggcgtgagaaccgcaccgaccgtatggaaattaccgccataggtcagcgcctcaaaatagggctgccagtcgaggctgacgttgacggtgttgataatgagatcaaactgccccgccagtgctttcagtgcctgcggatcgcggctattcaccactttatcggcacccatcgccagcacttcctgctctttcgccggattagaactaaaggctgtcacctcgcatcccattgcgtgcagaagttttatagcgatatgccccagcccgccaataccaattaccccaacgcggctggtagcagtgatatggtgcatcaacagtggtttaaagaccgtgataccgccgcacaacagcggcccggcggactcgatatcaatattttctggcagtggaatcacccattgccagtccgcacgcaacttctcggcaaagccaccgcgattcataatcgtcggcaccgcaccttgctcgcagttgatctgattaccgctaatacaggcgtcgcagtgaccacagctacgcgccgtccagccaatcccgacacgctgaccgacctgcaaacctttatcctgcgcggcgctcccgagtgccaccacgcgcccaatcacctcatgcccggcaaccagcggatattgactaaatccccattcgttatcgatcatgctcagatcggaatggcagatcccgcagtaatccacctgcacttcaacatcttgtggcctcagctcaccgggatcgtactcataaacttccagttcgccgcccgcttcttttgcggcatagctttttatcatgctcattttttggtccttctctggtgttgtttgggaagtgtagagcatggcagggcggggtgcctggagtgtgacaaaggttacacatcgctgtatgcaatgctgaaaatttcagcacttagcgaggtgcgagcaagctggcgcttgcatggtggcgtgcgacaggtataatccacaacgttttccgcatacctcttcagtgccgaagtggcgaaatcggtagacgcagttgattcaaaatcaaccgtagaaatacgtgccggttcgagtccggccttcggcaccaaaagtatgtaaatagacctcaactgaggtctttttttatgcctgaaatccagtgtttatctatctttcccgctatattaactctctcaaggtcaaccgatatcaacgtacatctaccaacatatgttggtacagatgatggtatttccggttcgataatgcttgtaccaacagggagggaatacgagaaatcacaggacattgctaatgctggtacgcaatattacctgaagctaaaaacctgcacgttagccctttgtaggccagataagacgcgtcagcgtcgcatctggcataaacaaagcgcactttgctggtctgttcccctcaccctaaccctctccccggaggggcgaggggactgtccgggcacatttttagactttgtcatcagtctgagcctgccattggcaggctctggtgtccttttacgctaccatgctaataatcagcacaataatcagcccaaccacggagttgaccagctccagcagaccccaggttttcaacgtgtcttttacactcaggtcaaagtaacctttgaacaaccagaaagatgcatcgttaatgtgggtgagggtgttggaacccgcagccgtcgccagtaccagcagcgccggattcacgccaaccagctgaccagttgctggatctaggattgcagcactgataatcccggcggcggtcatcgcgctaacgacaccctgacccgtcgccagacgaattagcacagtgatcagccatgccatgatgtaggggctgatattgccgtgggacatcaacatgccgatggtgtcgccaatgccggtgtcgatgatggtctgcttcagcacgccacccgcaccgatgatcagaatcaccattgcaatactcttcaccgcgctttcaaaagcgttcatcacccactgcatgtcatgaccacgtgcggtgccaaagagtacgaatgcaaccaccatcgcaataaacattgcaatcgggctggaaccgataaagttaaccacttcccaggcaggggtatcttttaccagccagatattggcgatggtggtagagatcataatgatcgccgggatcagcggcaccagaatgctaacgccgaaagagggcagattattcatatctaccggttgatctgctttcaggaaacttggcgttgggcgctcaagattgccgaggaacttcggcaggatcagacctgcgcagattacacttgggatcgtcaccagtacgccatagatataaaccatccccatatccgcgccataagcattcaccagcgccaccggacccggctgcggtgggaacagactatgtgcggtagtggcagctgctactgccgggatcgccagtttcaggaacggaattttagcttcggcggcaataacaataaccagcggcgctaacatgataaaggccacttcatagaacatcgccagaccaaaaatcaggccgatgataatcacgctcagctgtacatagcgcagaccgagacgcgccagcagcgtatgcgctatctggtgagccgcgccggagtcgaccatcaatttaccgatgaccgcaccgaacaccacgatgatagccagttcccccagcgtgttgccgaagcccgctttcatagtgtgcagcaggctcatcaaatccatgcccgccagcatcccgacggacagcgccgccaccaacaaagccaccatactattgattttgaacttcaaattcagtaccagcatcagaccaatgccgaataccacccagagaatgttaagcacatgcataacgttttaccttacctggttgaaccgttgttattttgggcgatatgttatgtaaattggtcaaccattgttgcgatgaatgtcacatcctctgatcaataaccatcgattaccctttgctgcaatttgcagcaacaaccatgagagtgaaattcttgtgatgtggttaaccaatttcagaattcgggttgacatgtcttaccaaaaggtagaacttatacgccatctcatccgatgcaacgccacggctgcggtctggttgttcatccggatacctaaacaactccagggttccgcgtctctttgctgtggaacccactatgtgaaagaggaaaaatcatggaacagacctggcgctggtacggcccaaacgatccggtttctttagctgatgtccgtcaggcgggcgcaactggcgtggttaccgcgctgcaccatatcccgaacggcgaagtatggtccgttgaagagatcctcaaacgcaaggcgatcattgaagacgcaggcctggtgtggtctgtcgtagaaagcgtgccaattcacgaagatatcaaaacccacactggcaactatgagcagtggatcgctaactatcagcagactctgcgcaacctggcgcagtgtggcattcgcaccgtgtgctacaacttcatgccggtgctcgactggacccgtactgacctcgaatacgtgctgccagacggctccaaagctctgcgcttcgaccagatcgaattcgctgcattcgaaatgcatatcctgaaacgcccaggcgcggaagcggattacaccgaagaagaaattgctcaggcagctgaacgcttcgccactatgagcgatgaagacaaagcgcgtctgacccgtaacatcattgctggtcttccgggcgcggaagaaggctacaccctcgaccagttccgtaaacacctggagctgtacaaagatatcgacaaagcgaagctgcgcgaaaactttgccgtcttcctgaaagcgattattccagttgctgaagaagtcggcgtgcgtatggctgttcacccggacgatccgccgcgcccgatcctcggcctgccgcgcattgtttccaccattgaagatatgcagtggatggttgataccgtaaacagcatggcaaacggttttaccatgtgcaccggttcctacggcgtgcgtgctgacaacgatctggttgatatgatcaagcagttcggtccgcgtatttacttcacccatctgcgctccaccatgcgtgaagataacccgaaaaccttccacgaagcggcgcacctgaacggtgacgttgatatgtacgaagtggtgaaagcgattgttgaagaagaacaccgtcgtaaagcggaaggcaaagaagacctgatcccgatgcgtccggaccacggtcatcagatgctggacgacctgaagaagaaaaccaacccaggttactccgcaattggtcgtctgaaaggcctggccgaagttcgcggtgtcgaactggcgatccagcgcgctttctttagccgttaatatccaccggcatggctgcgcgccgtgccggttccttcttccttgccgtcactctttgaagacggattctggagtttacgatgactactattgttgacagcaatctgccggttgcccgcccgagttgggatcattctcgtctggaaagtcgcattgtgcatctcggttgcggggcgtttcaccgcgcgcaccaggcgctgtatacccatcatctgctggaaagcaccgacagcgactggggcatctgcgaagttaacctgatgccaggcaacgaccgcgtgctgatcgaaaacctgaaaaaacagcaactgctgtacaccgtagcggaaaaaggcgcagagagcaccgagctgaaaattatcggtagcatgaaagaagcgctgcatccggaaatcgatggctgcgaaggtattctcaacgcgatggcgcgtccgcaaacggcgattgtctctctaacggtcacggaaaaaggctactgcgctgatgcggcaagcggtcaactggatctcaataacccgctgatcaagcacgatctggaaaacccgactgcgccgaagtccgcgattggttacatcgtcgaagcgttgcgtctgcgtcgtgaaaaagggttgaaagcgtttacggtgatgtcctgcgataacgtgcgtgaaaacggtcatgtggcgaaggtcgcggtactggggctggctcaggcgcgtgacccgcagctggcggcatggattgaagaaaatgtcaccttcccgtgcaccatggttgaccgcatcgttccggcggcgacgccagaaaccttacaggaaattgctgaccagctgggtgtttacgacccgtgcgccattgcctgcgaaccgttccgtcagtgggtgattgaagataacttcgttaatggtcgcccggattgggataaagtgggcgcacagttcgttgcagacgttgtgccgttcgaaatgatgaagctgcgtatgctgaacggcagccactcttttctggcgtacctcggttacctcggcggctatgaaaccattgccgacaccgtgactaacccggcttatcgcaaagcggcctttgccctgatgatgcaggaacaagcgccaacgctgagcatgccggaaggtacagacctgaacgcctatgcgacgctgctgatcgagcgtttcagcaacccgtctctgcgtcaccgtacctggcagattgcgatggacggcagccagaagttaccgcagcgtctgctggacccggtgcgtctgcacctgcaaaacggcggcagctggcgtcacctggcgctgggcgtggctggctggatgcgttacacccagggcgtggatgagcagggtaatgccattgacgtggtcgacccgatgctggcggagttccagaagatcaacgcgcagtatcagggcgcagaccgcgtgaaagcgctgctgggcctgagcggtatttttgccgatgatctgccgcagaatgccgactttgttggcgcagtgacggcggcatatcagcagctgtgcgaacgcggtgcgcgcgagtgtgtggctgcgctgtaactaactgattaccctacagacttactggtcaatcaaactgatatttggttgaccagttttcgtttttttgcccacctgtacgtgccaacttccagtgctaatggtatagtttgagattaacgggggccgtaaaattgcccgttgtaggccggataaggcgttcacgccgcatccggcaaaaatttgattaaccgcacctaacggacacaacaccatgaaatctgccacctctgcgcaaagaccttaccaggaagtcggggcgatgatccgcgatctgatcataaagacgccgtacaatcctggcgaacggctgccgccggagcgtgaaattgcagaaatgcttgatgtcacgcggacggtggtacgtgaagcgctgatcatgctggagatcaaagggctggtggaagtacgccggggtgccggtatctatgttcttgataacagtggcagccagaacacagacagtccggatgccaacgtctgcaacgatgccggtccttttgagctgttacaggcgcggcagttattggagagcaacatcgccgagtttgccgctttgcaggctacccgcgaagatatcgtcaaaatgcgtcaggcattgcaactggaagagcgtgaactggcttccagtgcgccgggcagcagcgaaagcggtgacatgcagttccatctcgctattgccgaagcaacgcataacagcatgctggtggagctgttccgtcagtcctggcagtggcgggaaaacaatccaatgtggatccagttgcacagccatctggatgacagcctgtatcgcaaagagtggttgggcgatcacaaacagatcctcgccgcgttaatcaaaaaagatgcccgagcggcgaagctggcaatgtggcagcatctggaaaacgttaagcaacgtctgctggaattcagcaacgttgacgatatttattttgatggctatctgtttgatagttggccgctggataaagtcgacgcctgacttattataataagcgcaagggtaaacgttccttgcgctttcttaaattaagaagtcgcaatgagtattactttgtaaattgcagggtattgtttagctatctgtataacctgaatgttagtactcattcttcctggtagtaaggcgagattattaaagttgccatgcagcgtccggggaagtgttgggcgctgttttttttgtttcttaataatgtgttgtaagccgtagaaggcgtgtaggtcgcaccctatgcgacctacacatcagtcaggaattacccttcacgttctaccactttaatttccaccatgccgatcccgagcttacgcgggctgtgtccgaggatattcccttcgttggtactgacaggttccggcggcacaattaccagtgtgtcggcatcggttgggttatcgaaatgcagtgtggtggtggtcacttcattgcccagcacaagagtttgttcttcattgcctacgcgtaccggaataggacggctggcgttattgccgtatgctttggcggtaatcaccaggtcaaatttcttcggcagcggatgcttgtactcgatttttacttcatcgcccagctgcgcgttggaccagcggccccagctctccggacgggaaatcccgctaaactgtttcacctcttctggcgcaccggcgacgttaaagatgaaactgtcggctttgtagcgaatatcgttatcaacaatcttcagcgtatcgacattgcctttgtaacgcgccatgtcgatgaccgtatctttaaatgccgttttgccctgccatgttgttttgtcaacatgctgaacaatttgctgaccgccaagctgcccttggctgacacaccagtcggtggaaagtgccagttccggagcccagagttgtgccatcttgtagcaacggtcaacccagacgaaattgtcgcgtggagcgaaatcggccagctggaaacgcagcggtgcactgtattcgctttccggcagcggttccacgcgtttgtcactaacccgcaacagcagcggcaaacggaaatggctaccgctgaaggcaatcatgtttttctgctggtcgatggtgaactctttcatctctttagggaatttccacaggcggatgatatctggcttccacgccaatgttttctctttgatattgaggaagatttcgctcatgctctgcccggataaactgctacgaccaagtccgagatagttatcgccaccgagaatgtccagcaccgtcgcgccgttatccatcgtgttacgcttcactgccagcgtctcttgctgcggcttgtcgccacgaatgacaaaaaacaggttattgcgatcctgcttattgaggtatttccacgccgtgttgttcatcgctaaatggtcagaagagacgacgatgacggtatctttaaaccacggactcgctttgattttgttgataaacgtcgcgatgttctcctggctgcaacttaccgcgctgaaactctgattcggtttaccgtcaaaatcatattttttgcggttacaggtacgagagataaaaccatccgggtgatgggtatcgactgtcagggtaaacagactgaatcgctgaccactgcgggaaagctcttcaaactttttccacgcttcatcgagaacggtatcgtcgtagaatccccagtcgttgcgatagtgcgggtcggctaccacgcttttcagctcttcactgccgtataagtggtcgaagccatggctcttcaggaacacatctttaccggcaaaacgcagattcgcgccctgcacgaaatagttctgataaccgctgtttttcaggatatctcccagacagatgttctgcgggaagaagctggagacagaggcggaggcgttgccttcaaagggggcaaacagcggtatgccgcactgagaagccaccatgcccgcaatcgtgtaatctgttcccggcagctgctgcgtgtggctgaaatccaggccttcatttttcaacgcgcccagttcaggcgtgagatccgggaaagcctcgttatcaaaataggtccgctcgagactttcgccgtagatataaaccaggttgagtttcgggtcagggatagttttgctcggctctttataataagccgcaaagtccgggtcgccgtcgcgactctgggatttcaccagttccgttatctgacgaaatgccgggctggcgtccacgctacccagcgccagtaagagcgccagcaggctgtaaccaaaatggtgcggatgatggcgacgacggcgcaggatccagcccagcgcaccgaacaccgctgtcagccccagcacaatgccgatacccggcaaaatgtatttgctgacgccagcaccggtcaggctgttggttaaggtatagagaaccgcgtcgttaataccatcgccagtaaaatagtcgctggcaaacagggtgatatttaaaacgacaaatagccccagcaccgttaacgtggctgcaaaccaccaggtgttacgtcccgctttccatgcgtaaatcagcacagaggcgagaaaaagggcgaaagagagtagttcactcaacgggcgatcctcactaaaccgggccgtttagccaacgtttaagctttttgagaagcacaatgtaatggcgtcgccatattgctgcaattctagtgtcaaaaaaatgcgatgttgttaggaattagtttataaacagacttttttgattacggtcacttcccgtgtaacaggggtaaaaccgtccaggagcagggaaaagggcaggagagagccgcgtcagccgggtaacagctaaaacgcggcgtttcgcggttcaggaaatgaagttcagcccctgttttaacaccagatcgcaggctttggttttcaccttttctgccagcggagttgttccgatgttatccagattgagttgctgaccatctttggttttcagcaaaccctgaatgccgtccagatagttggtgtcttctttttgctcttcactgttcaggcccagcttttccagcacctggttcttgatgttttcggcatcggttacgctcgccagcttttgcttcgcgcagtattgcagaatgcctgcggcattgttcatgttatctgcgcttaaggcctggtttccgctgctaagcaagttagttaaactcgcgaggctccaaccgccttcctgtgtcgtgctgttttggttgccaagttcgctggcggcgctggagagcgcatctttccaggacgcagcatgcaccccggtggaaattaatgcgctggcggcaatggcacagcacagaagatgtttaacagttttcatcatcattactcaaggtggaattgtgtcgcagtataccgccagaaacggggattaatactctttacctgttacccggctacggtagctatcccagttgaagatcacccacaaactgttacccaggcgcatacggtccatcacgcgttcgcccagcaacttggtcatctcttccatattactgttggtcagcatcccggttgggcgtttggaagaagagcggcgatcgacgatctggttgatgatcactttttcgtatttgctttcggtctgcacgccgatctcatcgatcaccagcagatcaacgttgctcagatcgttaagcagttgttcttcgctggtaccgctattcctgaaggtatctttcatcgcgctcataatatcggccacggtgatgatcaatacggatttaccgcgtagcagcagctcgttgcagattgccgccgccagatggtttttgccggttcctggcttaccagaaaagatgaagctggcgatgttgccgtcaaactcttcgacatactggcgcgctttgcttaacgcattcatctgcccttcacactcaacgcgatagttctcaaaggaacagttctgatgcagtggacgaataccggagcggttaaaggtgcgctgcattttcatcgcccgattttcacgttcgagagcggcggagcggatcgctccttgttctttttgccaggccagtagttcttcacccgttttgaatgcgggtttgatatgggcaggcatcattttttgcaggcgttgcatcaggtcgccaacgtttttcatcgttaccctctgaatcctggtggaatttggctgtcaggttcgctgaccgtattcacatctcgtttcggcagtccgccgttgctggcacgaccgatttgcaggctgcgcgccagtttttgttgccactgcacatggtgaaagactttaccttccgcctgccagtaggcaatgaaactggccagttcttcggtggtcaccggctctcttagcgccacgccccatagcgccgccaggcggataaaatcggcatcgggttgccagtccggatacatggcgaatttccccatgggtacagcaacgggagcggcttgcggttcctgatagagttgatcgtccagagcgacatcgcttcccggacgcgccagcttttcttccagcgccagcagttcagccaggcgtgcaggcgtgacggcataaaacgccggggcattgttagcaaatacggcaaccacaccgccttcagcttttgccagaacggtttggtgatcgtgtaccagggcgtcaataccaacgacgtccggggtcaaaactctggaagacatactgtttctcaaatatggaacgatgaacgagaagggagataacttttatagtaacacacggaggagaggaggctgtctctcatccgtgtgcttaagcgaggcaattttatacgcgagggcgcttgcggtacaaccataatccaggaatggaaagaccgatggataacgcaccaacaatgctactagctgtaagaaagttggttaacagggtaatcatcaacggttcgctgtaacctaactggctgatttttaccgcgctaatcattgcggtataagcgcttatgcccgggaacatagggataacggccgccacggtaaacactttcggatgcgccagataccagcggctccattgaataccaatggtaccgaccagcatagaagccataaaggtactccactcaatattcaacccgctggtcatcaagatcattcgggaaccatgacctatcgagccaagcagcgcacaccagcgtaacgcccgcacgggaacgttgaacaccatcgcaaagccgaccgcaggaatggcggcgaggatcatatcctgcgccaacgctaacagaaattcgatcacacccatccgcgtagcccccaaatcgtcagtgccatcactacgccgacgcaggtagccagtgtcagcagactggcgatcgcccagcgtgccagtccggtattgatgtggcctttaaacatatcggcgacggcattaatcaacggaaagcccggcactagcagcagaacgctggcggccatcgcaatggtgggggtattgctgaaagtggggagttgcaaaagcaatccggaaatggtggtggcggcgaaagcggtaaggcaaaagttgatctgtggatgaagatgacgttgtgccagcagctggcggatatacatcgcggtcgtactggcaaagaaggtgatgacggcaccatcccagccaccgttattgagtttacagaaacaggcgcaagaaaggccaaccattaaggctaccagccatcttgggtaacgtaatggctgaatttggctaaatcgtttctctacgcctttgtaatccagcagatgatgctccgcaagaatcacaatgtgctggacttcagtcaccacatgcatattaatgccgcgatcgtgatttttacgtgtgcttgtcaggcattgcccatctttaatagttgtcagcactatggcgttgctagagatagaactttcgacgctgtccattcccagtgcccgacccagtcgactggaaagctcatcaaccaacgcgctttccgcaccatgttgcaaaagaaataatccacactggatacaaagccgtgttacggctcgctgttgctcagtttgcataactcgccctttgtcatagacgtgctgcgtattgttcagataatgagaatccatttgtatcatgaagcacggttgttttgcggtaggttaagatcaaaattgcgctgattaatcctggttatcgggagaagctcggtgataaaaagcgaattatctctcgccgcaaacaaactatcacatgaatattatcatcataatgaatttattgtttggcctttacgaatcaggataatagataaccgggcacgttttttaatgttaacaagctaaaaccatcagatttcattgaataaatattggttgtgtgattttgcattctgcgggaagggatatcatttaattataaattaaatgaatgtgatttctgtttttcattaagtattcctaacaacttaatgtagatattttaaatgtctccaggctatttcaccaggttatcatttgatgctaaccttctgacacatgcagtggagttgttgtgcagcaggagtatgctgatatgaaagtgaatgctaaggataatttattcgcttaatctattaatttgctggaaacatttaaggaatgaatatcctgaataaaccatcataatttttagacagtggatgtggaggaaatatgttgccaggatgctgcaaaaatggaattgttatcagtaaaatacctgttatgcaagcagggttaaaagaggtcatgaggactcacttccctgaatatgaaataatatccagcgcctctgcggaggaccttaccttattacaattacgtcgttccggattagtcattgctgatttagccggtgaaagtgaagatccacgttctgtttgtgaacattattattctttaatcagtcaatatcgggaaattcactgggttttcatggtgagtcgctcctggtattcccaggcagtagaactgctcatgtgccctacggcgacgttattgtctgatgttgaacccattgagaatctggtcaagaccgtacgttccggcaatacgcacgcagagcgtatcagcgccatgctgacctccccggcaatgactgaaactcatgattttagctatcgctccgtcattctcactcttagtgagcgcaaggtactgcggctattaggtaaaggatggggcatcaaccagatagctagtttgcttaagaaaagtaataaaactatcagcgcccaaaaaaacagtgcgatgcgtcgactggcaattcacagcaacgctgaaatgtatgcatggataaatagcgcgcagggtgcaagagaacttaacttgccttctgtttatggagatgccgcagaatggaacacagccgaattaagaagagaaatgagccacagttaaaaaaatgcgtcatgagtagtatcggtattgagagtttattcagaaagtttgcgggtaacccttataagctccatacctataccagtcaggagagttttcaggatgccatgagccggatcagctttgcggcggtcattttttctttttctgccatgagaagtgagcgcagagagggattatcttgcctgactgaactggcgattaagtttccgcgtacccggcgtttagttattgcggatgatgatattgaagctcggctgattggtagtttgagcccaagtccgctggacggtgtattaagtaaagcgagtacgctggagatttttcatcaggaactctttttgagtttaaatggtgtacgtcaggcgaccgaccgactgaacaatcagtggtacattaaccaaagccggacgttaagcccgacggagagagaaatattgcgctttatgagccgtggctacagtatgacacaaattgccgagcagcttaaacgcaatatcaaaacgatccgtgcacataaatttaatgtgatgagcaaactgggcgtcagttctgacgcagggttgttggaggccgcagatattctgttatgtatgcggcattgcgaaacaagtaatgtgttgcatccctattaatccgcatgatgccgggtttacttccccggcagtgctttcatttcagcgtacaatcgccacattgctgcacatccggtaagcgataacgctggcagcaagtgcggcgcaccagcaggccgtcgcgcagtaccacggtacgccagagtggattatcttcaccgttcgtgagcgttttctcaaaaaagagggcatggcgcaggctttcaacagtagcctcgccgagcagttgcttcatctcagtgagataccagttgatcaaataaccggtattactccagataagtttgccgttgatctctccggtcgcttctagtgcttgcacaaccggaaccagcgcctggctgattaacgtttccattcgatgctgcgggctatgtggtgttgcgtttttatcttcacacacatcgacccagaaacaggcgacgcgtccggtttcgtgaaactcagcatggaaatgttccgggctcacatctaatgccttttcctgcgtcagtagcgccagcattaatggtggcaccatcaggccgatataccattgtgcccatagactgatcagcggtttgttctcgcggatcatcatcggttggttgcgatagatatgatcggaatagaccgccagcagagaacttagcacattcggactactccattgcgccagcgtcatggcgttaagtggggcaggttcatccaggcggataaactccagcaaatgttcacgatgttttgcgatcgtcgcccgcacggcttgcgcaagcgtgggatcctgcggctggagatgcgttcgccagatgacatcttcatagagcggtgcggaacgataggccataatcgggatagtaatctaaatgataatgattgctaatcatagcgataggtttacccgatagcaagggatttatctggcttgcaaatgataaaaattatcatatgatattggttatcattatcaatgaaagagatgaaatcatgttgcaacgtacgctgggcagtggctggggagtgttgctgccgggattgctgattgcggggctgatgtatgcggatttaagcagtgatcagtggcggattgtcattctgatgggattagtattgacgccgatgatgctgtatcacaaacagttgcggcattacattttgctaccaagctgcctggcacttattgctggcatcatgctgatgataatgaatttgaatcagggatgaaaaatcaaggaagaaacaagaaaggaagtaaagataattggtgcgaggggggggacttgaacccccacgtccgtaaggacactaacacctgaagctagcgcgtctaccaattccgccaccttcgcacagtcatcttactttttttgatatcgcctcgtttggtgcgaggggggggacttgaacccccacgtccgtaagaacactaacacctgaagctagcgcgtctaccaattccgccaccttcgcccagtgcgagcaatatcaacgtggtttttggtgcgaggggggggacttgaacccccacgtccgtaaggacactaacacctgaagctagcgcgtctaccaattccgccaccttcgcataccatcaattcttaaaaagaattgctaccacggaggcgcattctagtggttttcagcttttcgtcaatagttaattatcgacagaggtgtaattgctggaaaaatgtccatcaggaaactagcgtgcaggtttggtatgcatgcgggggcagatgccagatgcgacgctggcgcgtcttatctggcctacgaagggctaacgtgcaggttttgtaggtcggataaggcgttcacgccgcatccgacacggtattcggcgagataattaacctttcttcgcctggcgggtcataatggcgcgatacaccttgaagcgccctgtttgcgcgatcacttcgtggaagccaaatgtctcatccagcacgtccggataaggcaggaaggcgttcgctacaattcgcagctcgccgccgctattaagatgacgcaccgcaccgcgaatcagcgtttgcgccgcatccaggctggtttgcatcccatcgtggaacggcgggttggagatgatcatatcaaaacgacctttcacctcggaaaagacgttgctggcaaagacttcaccttcaacaccgttggccgcaagtgttgcgcggctggcttctaccgccggggcagagacatcgcacaaggtgagacgaattttcgggctatggcgcgcaaaggcaacactaagcacgcccgcgccacagccgacatccagcactttacctttcgtgtgcggagttaacgtgctgagcagcaactggctaccgacatccagaccgtcgcggctaaacacgccaggcagcgttttgaccgtcaggccatcgacgctgtattcgccccagaatttctccgcatcaaataccggctgtttttccagacgaccaaaatagaggccacagcgacgagcgctgtcgactttattcaacggcgcataatctgccagcatctgctcggcgctgcgcacgccgctgcggttctcgccaacgacaaaaatatctgtccccactggcagcagagaaagtaaattcatcaactggaactgggcttccggtttgttcttcggccagtagtaaatcagcgtatcgcaatctgcgacgtcatccgccgtggcgaccagactgaaacgggcgttatcccccatctggcggcttaatacctgccagtggtggaattgctgggtatgagcacggctggccgcggtatctaaacgcgcgggcaggtcatcctgtaagtctccggcaaacagaatacggctttgttcgaaatcatcactgtgacgcagcaagacttcacttgccggggtaaatgcagacatggaatgctcctcaattgatactggcggcgattatagccatatgttggcgcggtatcgacgaatttgctatatttgcgcccctgacaacaggagcgattcgctatgacatcccgacgagactggcagttacagcaactgggcattacccagtggagcctgcgtcgccctggcgcgttgcagggggagattgccattgcgatcccggcacacgtccgtctggtgatggtggcaaacgatcttcccgccctgactgatcctttagtgagcgatgttctgcgcgcattaaccgtcagccccgaccaggtgctgcaactgacgccagaaaaaatcgcgatgctgccgcaaggcagtcactgcaacagttggcggttgggtactgacgaaccgctaagtctggaaggcgctcaggtggcaagtccggcgctcaccgatttacgggcaaacccaacggcacgcgccgcgttatggcaacaaatttgcacatatgaacacgatttcttccctcgaaacgactgatttaccggcggcttaccacattgaacaacgcgcccacgcctttccgtggagtgaaaaaacgtttgccagcaaccagggcgagcgttatctcaactttcagttaacgcaaaacggcaaaatggcggcgtttgcgattacgcaagtggtgctggatgaagctacattgttcaatattgcggtcgatcctgactatcagcgtcagggattgggaagggcgctgctggaacatctgatcgacgaactggaaaaacgcggcgtggcgacactatggctggaagtccgtgctagtaacgctgccgccattgccctgtacgaaagtttaggctttaacgaggcgacgattcgccgcaattactaccccaccacggacggtcgcgaagacgccatcatcatggcgttgccaatcagtatgtaatacaaggtggaataatgaagtgggactggattttctttgatgccgatgaaacgctgtttacctttgacagtttcaccggcctgcagcggatgtttcttgattacagcgtcacctttaccgctgaagattttcaggactatcaggccgttaacaagccactgtgggtggattatcaaaacggcgcgatcactagtttacagcttcagcacgggcggtttgagagctgggccgaacggctgaacgtcgagccaggtaaactcaacgaagcctttattaatgcgatggcggaaatctgcacgccgctgccgggcgcggtttctctgcttaacgccattcgtggcaacgccaaaatcggcatcatcaccaacggctttagtgccttgcaacaggtgcgtctggaacgcacgggcctgcgtgattacttcgatttgctggtgatttccgaagaagttggcgttgccaaaccgaataagaaaattttcgattatgcgctggaacaggcgggcaatcctgaccgtagtcgcgtgctgatggttggcgacactgccgagtccgatattctcggtggcatcaacgccgggcttgcgacctgctggctgaatgcacaccatcgcgagcaaccagaaggcatcgcgcccacctggaccgtttctagcttgcacgaactggagcagctcctgtgtaaacactgattgcctcccccccgttgatgggtaaaatagccgcaatttttcgttttcaacaagcgcggcgcgatgccgcttactcaagaagaaagaattatgacgttgtctccttatttgcaagaggtggcgaagcgccgcacttttgccattatttctcacccggacgccggtaagactaccatcaccgagaaggtgctgctgttcggacaggccattcagaccgccggtacagtaaaaggccgtggttccaaccagcacgctaagagcgactggatggagatggaaaagcagcgtgggatctccattactacgtctgtgatgcagtttccgtatcacgattgcctggttaacctgctcgacaccccggggcacgaagacttcagcgaagatacctatcgtaccctgacggcggtggactgctgcctgatggttatcgacgccgcaaaaggtgttgaagatcgtacccgtaagctgatggaagttacccgtctgcgcgacacgccgatcctcacctttatgaacaaacttgaccgtgatatccgcgacccgatggagctgctcgatgaagttgagaacgagctgaaaatcggctgtgcgccgatcacctggccgattggctgcggcaagctgtttaaaggcgtttaccacctttataaagacgaaacctatctctatcagagcggtaaaggccacaccattcaggaagtccgcattgttaaagggctgaataacccggatctcgatgctgcggttggtgaagatctggcacagcagctgcgtgacgaactggaactggtgaaaggcgcgtctaacgagttcgacaaagagctgttccttgcgggcgaaatcactccggtattcttcggtactgcgctgggtaacttcggcgtcgatcatatgttggatggcctggtggagtgggcacctgcgccgatgccgcgtcagactgatacccgtaccgtagaagcgagcgaagataaatttaccggcttcgtatttaaaattcaggccaacatggacccgaaacaccgcgaccgcgtggcgtttatgcgtgtggtgtccggtaaatatgaaaaaggcatgaaactgcgccaggtgcgcactgcgaaagatgtggtgatctccgacgcgctgacctttatggcgggtgaccgtagccacgttgaagaagcgtatccgggcgatatcctcggcctgcacaaccacggcaccattcagatcggcgacacctttacccagggtgagatgatgaagttcaccggtattccgaacttcgcaccagaactgttccgtcgtatccgcctgaaagatccgctgaagcaaaaacagctgctcaaagggctggtacagctttccgaagagggcgcggtgcaggtgttccgtccaatctccaacaacgatctgatcgttggtgcagttggtgtgctgcagtttgatgtggtggtagcgcgcctgaagagcgaatacaacgttgaagcagtgtatgagagtgtcaacgttgccactgcccgctgggtagaatgtgcagacgcgaagaaattcgaagagttcaagcgtaagaacgaaagccaactggcgcttgatggcggcgataacctcgcttacatcgctaccagcatggtcaacctgcgcctggcacaggaacgttatccggacgttcagttccaccagacccgcgagcattaattcttgcctccagggcgcggtagccgctgcgccctgtcaatttcccttccttattagccgcttacggaatgttcttaaaacattcacttttgcttatgttttcgctgatatcccgagcggtttcaaaattgtgatctatatttaacaaagtgatgacatttctgacggcgttaaataccgttcaatgcgtagatatcagtatctaaagccgtcgattgtcattctaccgatattaataactgattcagaggctgtaatggtcgttattcatcactcatcgcttttgtgatggcgaccattgacttctgtagagggtgaagtctctccctattcagcaatgcaacctcgtgttgccaggctcaaattacgagcaaacatacaggaataaatcgatgactatgacaagactgaagattagcaaaactctgctggctgtaatgttgacctctgccgtcgcgaccggctctgcctacgcggaaaacaacgcgcagactaccaatgaaagcgcagggcaaaaagtcgatagctctatgaataaagtcggtaatttcatggatgacagcgccatcaccgcgaaagtgaaggcggccctggtggatcatgacaacatcaagagcaccgatatctctgtaaaaaccgatcaaaaagtcgtgaccctgagcggtttcgttgaaagccaggcccaggccgaagaggcagtgaaagtggcgaaaggcgttgaaggggtgacctctgtcagcgacaaactgcacgttcgcgacgctaaagaaggcagcgtgaagggctacgcgggtgacaccgccaccaccagtgaaatcaaagccaaactgctggcggacgatatcgtcccttcccgtcatgtgaaagttgaaaccaccgacggcgtggttcagctctccggtaccgtcgattctcaggcacaaagtgaccgtgctgaaagtatcgccaaagcggtagatggtgtgaaaagcgttaaaaatgatctgaaaactaagtaattcgtcgtaattcgtcctcccgaactttgtcgggaggcgcgatgtgcaccacactaaaaatatcgcattgagtgattttcacgctcatatcaagcggtgacattaactatggtaaaggagacgcttatgtttcgttggggcatcatatttctggttatcgcgttaatcgccgccgcacttgggtttggtggtctggccggtaccgctgcaggcgcagctaaaattgtctttgtcgtcgggattattctgttcctggtgagtttgttcatgggccgaaaacgaccctaaatttcagaccattaagaaaattttatccaaagccagtccagcggactggcttttgcggttttagcgaataataaattgcgttactttgtcattctttcacaacaaaaacaggaaggcagaggtggggcagcgaatacctgtaacgcttggtaatattgcgccgttgagcctaaggccgttccagcctggacgaatagctctggtgtgcgaaggcggcggacagcgtggaattttcacggctggcgtgctggatgagtttatgcgcgcgcagtttaatcctttcgatctttatctcggcacatctgccggggcgcagaacctcagcgcgtttatctgcaatcagcccggttacgcgcgcaaagtcatcatgcgctataccacaaaacgcgaatttttcgatccattgcgctttgtccgtggaggaaatcttatcgatctcgactggctggtggaggccactgcaagccagatgccgttgcaaatggataccgccgcgcggttgtttgacagcggcaaaagcttttatatgtgcgcctgtcgtcaggatgactacgcgccgaattactttttaccaaccaaacaaaactggctggatgtgattcgcgcctccagtgcgatacctggcttttatcgtagcggagtgagcctggaaggcattaactacctggatggcgggatcagtgatgcgattccggttaaagaggcggcaaggcagggcgctaaaacgttggtcgtcattcgcactgtgccgagtcaaatgtactacacgccgcagtggttcaaacgcatggaacgctggctgggtgacagtagcctgcagccgctggtcaatctggtgcagcatcatgaaaccagctatcgtgacattcagcaatttattgagaaaccaccgggcaagctgcggatattcgaaatttatccgccgaagccattacatagtatcgcgcttggcagtcggattccggcgctgcgtgaagactataaacttgggcgtttatgcggtcgttatttcctcgccacggttggcaagctattaactgaaaaagcgccgcttacccgccatctggtgccagtggtgacgccggaaagcattgtcattccgcctgcgccagtcgccaacgatacgctggttgccgaagtgagcgacgctccgcaggcgaacgacccgacatttaacaatgaggatctggcttgatttgccgttttatcgacacccactgccattttgatttcccgccgtttagtggcgatgaagaggccagcctgcaacgcgcggcacaagcgggcgtaggcaagatcattgttccggcaacagaggcggaaaattttgcccgtgtgttggcattagcggaaaattatcaaccgctgtatgccgcattgggcttgcatcctggtatgttggaaaaacatagcgatgtgtctcttgagcagctacagcaggcgctggaaaggcgtccggcgaaggtggtggcggtgggggagatcggtctggatctctttggcgacgatccgcaatttgagaggcagcagtggttactcgacgaacaactgaaactggcgaaacgctacgatctgccggtgatcctgcatagtcggcgcacgcacgacaaactggcgatgcatcttaaacgccacgatttaccgcgcactggcgtggttcacggtttttccggcagcctgcaacaggccgaacggtttgtacagctgggctacaaaattggcgtaggcggtactatcacctatccacgcgccagtaaaacccgcgatgtcatcgcaaaattaccgctggcaagcttattgctggaaaccgacgcgccggatatgccgctcaacggttttcaggggcagcctaaccgcccggagcaggctgcccgtgtgttcgccgtgctttgcgagttgcgccgggaaccggcggatgagattgcgcaagcgttgcttaataacacgtatacgttgtttaacgtgccgtaagccggataaggcgttcacgccgcatccggcagttggcgcacaatgcctgatgcgacgcttaacgcgtcttatcatgcctacaggtttgtgccgaaccgtaggccggataaggcgttcacgccgcatccggcagttggcgcacaatgcctgatgcgacgcttgtcgcgtcttatcatgcctacaagtctgtgccgaaccgtaggccggataaggcgttcacgccgcatccggcagtcggcgcataatgcctgatgcgacgcttgtcgcgtcttatcatgcctacaggtttgtgccgaaccgtaggccggataaggcgttcgcgccgcatccggcagttggcgcacaatgcctgatgcgacgcttgacgcgtcttatcaggcctacaagtctgtgccgaaccgtaggccgtatccggcatgtcacaaatagagcgccggaaatatcaaccggctcaccccgcgcacctttaacgcatcagccaacggctcaacgtcttccggcgtggcgctcgcccagctttgcgcctcgccatacacgccgtgggcatgaaacgcgttcaggcgtaccggaacatcgccgagtcccttgataaacgccgccagttcttcgatgtgttgcaaataatccacctggccagggatcaccagcaaacgcagttccgccagcttgccgcgctctgccagcaaatagatgctgcgcttaatctgctgattatcgcgtccggtgagttgttgatgacattcgctcccccacgctttgagatcgagcattgcgccgtcgcacaccgggagcaatttttcccagccggtttcgctcaacatgccgttactgtccaccagacaggtgagatggcgcagttgcggatcgtttttgatagcagtaaacagcgccaccacaaacggcagctgggtcgtggcttcaccgccactcaccgttatcccttcgataaacagcactgctttgcggacatggctaagcacttcgtccacgctcatggattgcgccatgggcgtggcatgttgcggacacctcttcaggcaggtatcacactgctcgcaaaccacagcgttccacaccactttgccgtcaacaatctgcaacgcctgatgcggacactgtggcacgcactccccacagtcattgcaacgtcccatcgtccacggattgtgacagtttttgcagcgcagattgcagccctgcaaaaacagagccagacgactgcctggcccgtcaacgcaggagaaggggataatcttactgactaaagcgcatctgctgttcatggcttatcacgcgcggctggcgttccagaatacgagtgttgcgtgcggcttcttcgcccagccaggtggtgttggtgcgactaccttcggcgcgatatttttctaaatcgctcaaacgcaccatataaccggtaacgcgaaccagatcgttaccgctgacattggcggtaaattcacgcattccggctttaaaggcaccgaggcaaagctgtaccagtgcctgcgggttacgtttgatggtttcgtcgagcgtcagaatgtcgctgatgccggaataataataagcatgatgcggggcgacagtttgcagatgggtgatcggatctggctcatcgccatacggcaaacgcgcgcccggcgtggtgccgatatcggaactgatcccgctctgtgcgtgtaacatggcgcgtttttgccagccatatttcacgggggtattggcgacaaactccgccagttgcgcgctgatgcgataacctacttcatttgcggcggcttctttaccgtagcgcgcggcaatcccttctttttcacacagcaagttaaccgcttccgccagcccatacatgccaaacattggcacaaaacgttcagggttaatcagcccttctttcaccaggaagctattctcaaagaagtgactttgttgatagaggaattcacaccgcgcatcgatgatggcgatctgctgctggcagtagtgcggtagagtgcgcgtaaagaagtcatccaggctttcgctgcgctcggcaatggctttcaggttaaggcgtaccagcgtgctgccaccacccgccagcggcagactgttgtaacagctcacaatcccgtagcccccttttgtgaaaattttatcatgcaccggaccgttggcgatgtgcggtttgctacattcacagatgttcttcgccacttccagcagcaggtcatcaggggtgatttcaggatcgtagataaaggtcaggttcggactaacctgcttcaactctgcatctgcacgtaagatcgcgcgggtaatggggctatcagacgggccgatattggcgtgcataaaggcgtctggcagggttctgtcgaggtaacgccagaaacgttttattcgaacatcgatctcgtcttgtgttagaattctaacatacggttgcaacaacgcatccagttgccccaggtagaccggcatgcttgtgacgctcggtacgtggtggtaaagaatggtcagcagagagagtgcgtcatcaagatctttcgcgccttccagctccagccattcggaaccgttcgccagaaaacgggcgtaatcgggtaagacatagcgcggtttgtacggcgcatgaccttcaaacatatcgcagattacaccttcatccagcgcgcggcgggcttcggcaggaagctgtgggtaaggcagattgttttctgcttccagtgccagaaaatggcgcttctgctccgggctaagcactgggctggtgacaatttgctggcaacgttgttgcagtgcattttcatgagaagtgggcatcttcttttccttttatgccgaaggtgatgcgccattgtaagaagtttcgtgatgttcactttgatcctgatgcgtttgccaccactgacgcattcatttgaaagtgaattatttgaaccagatcgcattacagtgatgcaaacttgtaagtagatttccttaattgtgatgtgtatcgaagtgtgttgcggagtagatgttagaatactaacaaactcgcaaggtgaattttattggcgacaagccaggagaatgaaatgactgatctgaaagcaagcagcctgcgtgcactgaaattgatggacctgaccaccctgaatgacgacgacaccgacgagaaagtgatcgccctgtgtcatcaggccaaaactccggtcggcaataccgccgctatctgtatctatcctcgctttatcccgattgctcgcaaaactctgaaagagcagggcaccccggaaatccgtatcgctacggtaaccaacttcccacacggtaacgacgacatcgacatcgcgctggcagaaacccgtgcggcaatcgcctacggtgctgatgaagttgacgttgtgttcccgtaccgcgcgctgatggcgggtaacgagcaggttggttttgacctggtgaaagcctgtaaagaggcttgcgcggcagcgaatgtactgctgaaagtgatcatcgaaaccggcgaactgaaagacgaagcgctgatccgtaaagcgtctgaaatctccatcaaagcgggtgcggacttcatcaaaacctctaccggtaaagtggctgtgaacgcgacgccggaaagcgcgcgcatcatgatggaagtgatccgtgatatgggcgtagaaaaaaccgttggtttcaaaccggcgggcggcgtgcgtactgcggaagatgcgcagaaatatctcgccattgcagatgaactgttcggtgctgactgggcagatgcgcgtcactaccgctttggcgcttccagcctgctggcaagcctgctgaaagcgctgggtcacggcgacggtaagagcgccagcagctactaagtaagatgctttacgcctgatgcgctgcgcttatcaggcctacgagacgtatctacccgtaggccggataaggcgtagacgcatccggcaaaagccgcctcatactcttttcctcgggaggttaccttgtttctcgcacaagaaattattcgtaaaaaacgtgatggtcatgcgctgagcgatgaagaaattcgtttctttatcaacggtattcgcgacaacactatctccgaagggcagattgccgccctcgcgatgaccattttcttccacgatatgacaatgcctgagcgtgtcagcctgaccatggcgatgcgagatagtggaaccgttctcgactggaaaagcctgcatctgaatggcccgattgttgataaacactccaccggtggcgtcggcgatgtgactagcctgatgttggggccgatggtcgcagcctgcggcggctatattccgatgatctctggtcgcggcctcggtcatactggcggtacgctcgacaaactggaatccatccctggcttcgacattttcccggatgacaaccgtttccgcgaaattattaaagacgtcggcgtggcgattatcggtcagaccagtagtctggctccggctgataaacgtttctacgcgacccgtgatattaccgcaaccgtggactccatcccgctgatcaccgcctctattctggcgaagaaacttgcggaaggtctggacgcgctggtgatggacgtgaaagtgggtagcggcgcgtttatgccgacctacgaactctctgaagcccttgccgaagcgattgttggcgtggctaacggcgctggcgtgcgcaccaccgcgctgctcaccgacatgaatcaggtactggcctccagtgcaggtaacgcggttgaagttcgtgaagcggtgcagttcctgacgggtgaatatcgtaacccgcgtctgtttgatgtcacgatggcgctgtgcgtggagatgctgatctccggcaaactggcgaaagatgacgccgaagcgcgcgcgaaattgcaggcggtgctggacaacggtaaagcggcagaagtctttggtcgtatggtagcggcacaaaaaggcccgaccgacttcgttgagaactacgcgaagtatctgccgacagcgatgctgacgaaagcagtctatgctgataccgaaggttttgtcagtgaaatggatacccgcgcgctggggatggcagtggttgcaatgggcggcggacgccgtcaggcatctgacaccatcgattacagcgtcggctttactgatatggcgcgtctgggcgaccaggtagacggtcagcgtccgctggcggttatccacgcgaaagacgaaaacaactggcaggaagcggcgaaagcggtgaaagcggcaattaaacttgccgataaagcaccggaaagcacaccaactgtctatcgccgtatcagcgaataacggtatactgatctgatcatttaaatttgaagcactgagtacggagaacatatgaaacgtgcatttattatggtgctggacagtttcggcatcggcgctacagaagatgcagaacgctttggtgacgtcggggctgacaccctgggtcatatcgcagaagcttgtgccaaaggcgaagctgataacggtcgtaaaggcccgctcaatctgccaaatctgacccgtctggggctggcgaaagcacacgaaggttctaccggtttcattccggcgggaatggacggcaacgctgaagttatcggcgcgtacgcatgggcgcacgaaatgagttccggtaaagataccccgtctggtcactgggaaattgccggtgtcccggttctgtttgagtggggatatttctccgatcacgaaaacagcttcccgcaagagctgctggataaactggtcgaacgcgctaatctgccgggttacctcggtaactgccactcttccggtacggtcattctggatcaactgggcgaagagcacatgaaaaccggcaagccgattttctatacctccgctgactccgtgttccagattgcctgccatgaagaaactttcggtctggataaactctacgaactgtgcgaaatcgcccgtgaagagctgaccaacggcggctacaatatcggtcgtgttatcgctcgtccgtttatcggcgacaaagccggtaacttccagcgtaccggtaaccgtcacgacctggctgttgagccgccagcaccgaccgtgctgcagaaactggttgatgaaaaacacggccaggtggtttctgtcggtaaaattgcggacatctacgccaactgcggtatcaccaaaaaagtgaaagcgactggcctggacgcgctgtttgacgccaccatcaaagagatgaaagaagcgggtgataacaccatcgtcttcaccaacttcgttgacttcgactcttcctggggccaccgtcgcgacgtcgccggttatgccgcgggtctggaactgttcgaccgccgtctgccggagctgatgtctctgctgcgcgatgacgacatcctgatcctcaccgctgaccacggttgcgatccgacctggaccggtactgaccacacgcgtgaacacattccggtactggtatatggcccgaaagtaaaaccgggcagtctgggtcatcgtgaaaccttcgcggatatcggccagactctggcaaaatattttggtacttctgatatggaatatggcaaagccatgttctgatggatttgggcggagcgttgactccgcctttgttatgtcacaaaaaggataaaacaatggctaccccacacattaatgcagaaatgggcgatttcgctgacgtagttttgatgccaggcgacccgctgcgtgcgaagtatattgctgaaactttccttgaagatgcccgtgaagtgaacaacgttcgcggtatgctgggcttcaccggtacttacaaaggccgcaaaatttccgtaatgggtcacggtatgggtatcccgtcctgctccatctacaccaaagaactgatcaccgatttcggcgtgaagaaaattatccgcgtgggttcctgtggcgcagttctgccgcacgtaaaactgcgcgacgtcgttatcggtatgggtgcctgcaccgattccaaagttaaccgcatccgttttaaagaccatgactttgccgctatcgctgacttcgacatggtgcgtaacgcagtagatgcagctaaagcactgggtattgatgctcgcgtgggtaacctgttctccgctgacctgttctactctccggacggcgaaatgttcgacgtgatggaaaaatacggcattctcggcgtggaaatggaagcggctggtatctacggcgtcgctgcagaatttggcgcgaaagccctgaccatctgcaccgtatctgaccacatccgcactcacgagcagaccactgccgctgagcgtcagactaccttcaacgacatgatcaaaatcgcactggaatccgttctgctgggcgataaagagtaattgtgtttcgctgcaaggcgattgccttgtgaagccggagcgggagactgctccggctttttagtatctattcatttttctctccagcttgaatattttcgctatacttttcagtgaaatgtgttaataaatctattcaagtatctattcacgaatctattcattaatgagcgagctgactgatcttttactgcaagggccgcgttctgccccggaattgcgccagcgtctggcaatcagtcaggcgacgttcagtcgccttgttgccagagaagatcgggtgattcgctttggtaaagcacgggcaacgcgatatgcactgctgcgtccttatcgcggaattgagcgtattcccgtctggcgggtggacgataccggaaaggcgcataaattcgccgacatccggttgtgctggccgcagggaagttgtctggtaacaggcgcagatggcgacgaacagtggtttgatggtttgccctggtatttgaccgatctccgaccgcagggctttttagggcgcgcgtggggcaggaagttagccgcgcaactgaatctgactgatgatatacgtctctggcaggaagaagatgtgctctacgccctgaccgtatttaacggtgaatatactggcggttggttggtcggggaggggaattatcagcgatggattactgcacaacaccctgcggaaattcctctggatcaaaaactcacccattacgaacagctggcaagtgatgcactggcaggagaaattgtgggttcttctgcgggcggcgagcagccaaaatttacctactatgcacaaacgccgagtggcaataaacatgtgttggtgaaattcaccgtaccacagcaaaccgcggtcagccaacgttggggtgacctgctaattgctgaatctattgccgcgcaaatcctgcgtgacggtgggatccacgccatcgagagtacggtgcttgtaacaagtaacaggcaggtattcctcgaagcggaacgctttgactgcaaaggtaacgatggtcgcttgcctattgtgagcctggaggcggtgcagagtgagtttatctcttctccgggaagctggccgcaggcaatgcgccgtttgtgtgagcaacaacttgtcactcaccagagcgtggcgcaaacagaagtgatctgggcatttgggcgacttatcgccaacagcgatatgcacgcaggtaatttaagcttttatttatctgaaccgccatttgcgctgacgcccgtctacgacatgctgccgatggtctatgcaccaaacagcgctggaatgctgcgtgatgctgccattgaggtgaagtttgatcttaacgtcagtaaaagcgcttggttaacggcgatcccgctggcgcagcagttctggcaaacggtcgccagagatccgcgtatcagcgaggcgtttcgccacattgcgcaagaaatgccggaaaaaatccggcaaatcgaagagaaagttgcccgcatgggcgggtaattaccttacagcccccgccatccatgcgcttaactcccgtagctctttttcctgttccgggaagtcaaccaacagcgcttcgcactcctgttgcagcatatctgcgcggtacaggcagccttgcagtcgtccggcgagggcttccagcggcgcggggttgaggctgtcggtaaacacctgggcgcgggtgatatggcctttttcaacgtcgaaatgcagttccacgccgccccaggtaaagcgttcatccagcagatggctgaatgccggagcctgaccgaagttccattcccagctactctggcgggcaaaggtttcggcgaagtttggcaagtctggcgttttgttcggggagatgatttccgcttccacgcgctcgccataatgggcgaaaaaggcctcggttatggcctcgcaaacctgctcatgggtgatccccggcaacagctcggtgaggttggtcacgcgggaacgtacgctcgtaatgcctttcgccgccagtttctttttatccggattgagatagtttgccaggcggctgaggtcggcattgagtagcaaggtgccgtggtggaagccgcgatctttggtttcgcgataggcgctgccactgactttgcggtcgccttcgacggttttcaccaccagatcgttacgtccggacgcttcggcgctgacgccgagcgcgttcagcgcattgagcacaatgctcgtggagatagttttatcgtactccggcttgccagccataaaggtaaagcaggtattgccgagatcgtggaacaccgcgccgccaccgctactgcgccgcgccaggcggacgttatcttcttccatccgccgggtattacactctttccacgggttctgcgcgcgaccaattactaccgtgtcggcattgcgccagagaaacagaacgcgctgcgtggcgggcatttggcgaaaaatacactcttccaccgccaggttaaaccacgggtcgtaagagtcagagatgagcaggcgtaatgtggacataacgatttcctttcttgtagtaatgggtcactcttttttctcgctttcttcctcttccggcaccggtttgctggcggctaacaggaaggggctttgctgccagcgggtgcgtttaccctgtagcagcgtgcgggtcagcactacaccgattgccagactgagcagcaacatcaggcgtaaaatgttagtggtgttatccacctgttgggcttcggtggcgagcgtatgggtgtcgagtgtcaggcgcagatagccgagcggtccgtttttacccgcaattggctcgacaatctgctggttaaaatagccgcctgcttttttaccgtcgagcgccagccggtcgcgcacttcgacgctttcgccagaacgtgcgataagatcgccttgttcgtcatacacacccgcgtcgaggatacggctttcatccgttaactgatcgaggatcgcctgaatgcgtttttcatccggactgtcggtacgcatcagcggtgcaacgttcagcgtcacctgacgcgccagggtgcgggccagttcttccagctgtggattacgctgtcgctggtggttttgactaaaccaactcgctccctgcatcagcgccactaacaaggcaagacagaacaggacaatcactgcccgatgcagccggaatttcagttttgtgcgagccatcttccaccctttgaaaatttgagacttaatgttgccagaagcaatggatacaaggtagcctcatgcgttattttccctgcttcgaacgattttacaggagccttaatgcctaacattacctggtgcgacctgcctgaagatgtctctttatggccgggtctgcctcttagtttaagtggtgatgaagtgatgccactggattaccacgcaggtcgtagcggctggctgctgtatggtcgtgggctggataaacaacgtctgacccaataccagagcaaactgggtgcggcgatggtgattgttgccgcctggtgcgtggaagattatcaggtgattcgtctggcaggtagtctcaccgcacgggctacacgcctggcccacgaagcgcagctggatgtcgccccgctggggaaaatcccgcacctgcgcacgccgggtttgctggtgatggatatggactccaccgccatccagattgaatgtattgatgaaattgccaaactggccggaacgggcgagatggtggcggaagtaaccgaacgggcgatgcgcggcgaactcgattttaccgccagcctgcgcagccgtgtggcgacgctgaaaggcgctgacgccaatattctgcaacaggtgcgtgaaaatctgccgctgatgccaggcttaacgcaactggtgctcaagctggaaacgctgggctggaaagtggcgattgcctccggcggctttactttctttgctgaatacctgcgcgacaagctgcgcctgaccgccgtggtagccaatgaactggagatcatggacggtaaatttaccggcaatgtgatcggcgacatcgtagacgcgcagtacaaagcgaaaactctgactcgcctcgcgcaggagtatgaaatcccgctggcgcagaccgtggcgattggcgatggagccaatgacctgccgatgatcaaagcggcagggctggggattgcctaccatgccaagccaaaagtgaatgaaaaggcggaagtcaccatccgtcacgctgacctgatgggggtattctgcatcctcagtggcagcctgaatcagaagtaattgctcgcccgccatcctgcgggcggcacagcattaacgaggtacaccgtggcaaaagctccaaaacgcgcctttgtttgtaatgaatgcggggccgattatccgcgctggcaggggcagtgcagtgcctgtcatgcctggaacaccatcaccgaggtgcgtcttgctgcgagcccaatggtggcgcgtaacgagcgtctcagcggctatgccggtagcgccggggtggcaaaagtccagaaactctccgatatcagccttgaagagctgccgcgtttttccaccggatttaaagagttcgaccgcgtactaggcggcggcgtggtgccaggaagtgccattctgattggcggtaaccctggtgcggggaaatccacgctgctactgcaaacgctgtgcaaactggcccagcagatgaaaacgctgtatgtcaccggcgaagagagcctgcaacaggtggcaatgcgcgctcatcgccttggcctgccgactgacaatctcaatatgttgagcgaaaccagcatcgaacagatctgcctgattgccgaagaagagcaaccgaagctgatggtaattgacagcatccaggtgatgcatatggcggatgtacagagtagccctggtagcgtggcgcaggtgcgtgaaacggcggcttatttgacacgcttcgccaaaacgcgcggtgtggcgattgtcatggtggggcacgtaaccaaagatggtagcctggctggcccgaaagtgctggaacactgtatcgactgtagcgtgcttttggatggcgatgccgactcccgttttcgcaccttgcgcagccataaaaaccgcttcggcgcggtgaatgagctgggcgtcttcgcgatgaccgaacaggggctgcgtgaagtcagcaaccctagcgcaattttcttaagtcgcggcgatgaagtgacctccggtagcagtgtgatggtggtatgggaaggaacgcgtccactgctggtggagattcaggcgctggtcgatcacagcatgatggcgaacccacgccgcgtggcagtggggctggaacaaaaccgtctggcaatcctgctggctgtgttgcaccgtcacggtggtctgcaaatggccgatcaggatgtgtttgtgaacgtggtcggcggcgtgaaggtaaccgaaaccagtgccgacttagcgttactgctggcgatggtttccagcctgcgcgacagaccgctgccgcaggatctggtggtgtttggtgaagtcgggctggcaggggagatccgcccggtgcccagcggtcaggaacgaatctctgaagcggcgaaacacggttttcgccgggcgattgttccggcggctaacgtgccgaaaaaagcgccggaagggatgcagatttttggcgttaaaaaactctccgacgcgcttagcgtgttcgacgacttataatgagatatacggagggagatatgagcagttttgattacctgaaaactgccatcaagcaacagggctgcacgctacagcaggtagctgatgccagcggtatgaccaaagggtatttaagccagttactgaatgccaaaatcaaaagccccagcgcgcaaaagctggaggcgttgcaccgttttttggggcttgagtttccccggcagaagaaaacgatcggtgtcgtattcggtaagttctacccactgcataccggacatatctaccttatccagcgcgcctgtagccaggttgacgagctgcatatcattatgggttttgacgatacccgtgaccgcgcgttgttcgaagacagtgccatgagccagcagccgaccgtgccggatcgtctgcgttggttattgcaaacttttaaatatcagaaaaatattcgcattcatgctttcaacgaagagggcatggagccgtatccgcacggctgggatgtgtggagcaacggcatcaaaaagtttatggctgaaaaagggatccagccggatctgatctacaccagcgaagaagccgatgcgccacagtatatggaacatctggggatcgagacggtgctggtcgatccgaaacgtacctttatgagtatcagcggtgcgcagatccgcgaaaacccgttccgctactgggaatatattcctaccgaagtgaagccgttttttgtgcgtaccgtggcgatccttggcggcgagagcagcggtaaatccaccctggtaaacaaacttgccaatatcttcaacaccaccagtgcgtgggaatatggccgcgattatgtctttagtcacctcggcggtgatgagatcgcattgcagtattctgactacgataaaatcgcgctgggccacgctcaatacattgattttgcggtgaaatatgccaataaagtggcatttatcgataccgattttgtcaccactcaggcgttctgcaaaaagtacgaagggcgggaacatccgttcgtgcaggcgctgattgatgaataccgtttcgatctggtgatcctgctggagaacaacacgccgtgggtggcggatggtttacgcagcctcggcagtagcgtggatcgcaaagagttccagaacttgctggtggagatgctcgaagagaacaatatcgaatttgtgcgggttgaagaggaagattacgacagtcgtttcctgcgctgcgtggaactggtgcgggagatgatgggggagcagagataaccgtgatgaaactgctcaaaggcgaggtataaaatgagtttttttgatgagttgaaaacctctctggaagaggctgtcgagattaaacaaggtttgaaaaaacctgcacgggtgacccgccacgaaattgaggatgctaaggctgttgtagaccggaaacggtgttcacgccgcatccggcattcggtgctcaatgcctgatgcgacgcttaccgcgtcttatcaggcctacagttttacaacgtattgaaattgctggttttgtaggccggataaggcgttcgcgccgcatccggcattttacgcattacttcgcaatacgcttgtacttgatacgcttcggctccagcgcgtctgcgcccagcgtgcgtttcttgtactcttcgtactcggtaaagttaccttcgaagaactcaactttaccttcatcctggtaatccagaatgtgcgtggcgatacggtcgaggaaccaacggtcgtggctgataaccatcgcacagcccgggaactccagcagggcgttttccagcgcgcgcagggtttcgatatccaggtcgttggttggttcgtcgagcagcagcatgttgccgccaacctgcagcagcttcgccagatgcagacgaccgcgctcaccaccggagagttcaccaacgcgtttaccctgatcaacccctttaaagttaaagcggccaacgtaggcgcggcttggcatctcggtgttgccgatcttcatgatatccagcccgccggaaacttcttcccaaacggttttgctgttatccatactgtcacggaactgatcaacgctcgccagtttcaccgtttcacccaaagtgatggtgccgctgtccggctgttcctgaccagagatcatacggaacagggtgcttttacccgcaccgttcggaccgatgatcccgacgatcgctcctttcgggatgctgaagctcaggtcatcaatcagcagacgatcgccataggatttacgcaggttgctgacttccagcactttatcgcccagacgcggtccaggtggaataaacagttcgttggtttcgttacgtttctgatattcggtgctgttcagttcttcaaagcgcgccagacgtgctttacctttgctctgacggcctttagtaccttgacgtacccattccagctctttctcaatgctcttacgacgcgccgcttcttgactagcttcctgcgccaggcgctgatctttctgctccagccaggaggagtagttaccttcccacggaataccttcaccgcggtcaagttcgaggatccagcctgcaacgttatcgaggaagtaacggtcgtgggtaatcgccacaacggtgccttcgaagtcgtgcaggaagcgttccagccaggccacggattcggcatccaggtggttggtcggttcgtcgagcagcagcatgtctggtttttccagcagcaggcggcacaacgctacgcgacgacgttcaccaccggagaggttagcgattttcgcgtcccagtccggcagacgtagcgcatccgccgcacgctccagctgtacgttcagattatgaccgtcgtgagcctgaatgatctcttccagacggccttgttcagcggccagcttgtcaaaatcggcatccggatcggcgtacagcgcatacacttcatccaggcgtttcagggcgttaaccacttcactaaccgcttcttcaatggactcacgcacggtgtgttccgggttcagctgcggttcctgcggcagataaccaatcttgatgtctggctgcggacgcgcttcaccttcgatgtctttatcaatgcccgccataatgcgcagcagggtggacttacccgcgccattcagacccaggacaccaatttttgccccagggaagaaactcagagagatgtttttcaaaatatgacgtttcggcggaacaactttgccgacacgatgcatggtataaacgaattgagccacgttggacttcgcctctatgtttatcgtgataatgagttttcaaaggcgaagtgtagcctttttccccgcctaatcccagccggtcgatcaccctcgcagtaaaagtaaaaaagtgtccgtaacgtggcgtaaacggcaatgactggttagcataaatctattacgcggcatgacgctgcattgatgtatttacacttagaggatgcgcttgtggaaaaagccaaacaagttacctggcggctgttggctgccggtgtctgtctgctgacggtcagcagcgtggcgcgagccgacagtctggatgagcagcgtagtcgttacgcgcaaatcaagcaggcctgggataatcgacaaatggatgtggtcgaacaaatgatgcctggactgaaggattatccgctttatccctacctggaataccgccagatcaccgatgatctgatgaatcaaccggcggtgacggtcactaactttgttcgcgctaaccccacgcttcctcccgctcgcacgctgcaatctcgtttcgtcaatgaactggcgcggcgtgaagactggcgtggcttgttagcctttagcccggaaaagcccggaactaccgaagcgcaatgtaattactactatgcgaaatggaacaccgggcagagtgaagaagcctggcaaggggcgaaagagctgtggctaaccggcaagagccagcctaacgcctgtgacaagttatttagcgtctggcgtgcgagtggtaaacaagatccgctggcgtatttagagcgtatccgtctggcgatgaaagcgggtaacacaggcctggtaacagtgctggcagggcagatgcctgccgattaccagactatcgccagcgcaatcattagtctggcgaacaaccctaatacggtactgaccttcgcgcgtacaactggcgcgaccgattttacccgtcaaatggcggcggtggcgtttgccagtgtggcgcggcaggatgctgagaatgcacggctgatgatcccaagccttgcccaggcgcagcagcttaatgaagatcagattcaggagctgcgcgatatcgtcgcctggcgtttgatgggcaacgatgtcaccgacgagcaggcgaaatggcgcgatgacgccattatgcgcagccaatctactagccttattgaacgccgtgtacgaatggcgcttggcaccggcgatcgtcgcggcctgaatacctggctggcgcgtctgcctatggaagcgaaagagaaagatgaatggcgttactggcaggcggatttattgctggaacgcggacgtgaagctgaagcaaaagagattttgcatcaactcatgcaacagcgtggtttctacccgatggttgcagcacaacgcatcggcgaagagtatgagctgaagattgataaagcgccgcagaatgttgacagcgccctgactcaggggccggagatggcgcgcgtgcgcgagttgatgtactggaatctcgataataccgcgcgtagcgagtgggccaatctggtgaagagcaagagtaaaacagagcaggctcaactggcgcggtatgctttcaacaaccaatggtgggatcttagcgttcaggcaacgatcgccgggaagctgtgggatcatctggaagagcgattcccgctggcttacaacgatcttttcaaacgctacaccagcggtaaggagatcccgcaaagctatgcgatggcgattgctcgtcaggagagcgcctggaatccgaaagtgaaaagtccggtaggggccagcggcttgatgcagattatgcctggtacagcgacccatacggtgaagatgttctctattcccggttatagcagtcctgggcaattgctggatccggaaacgaatatcaacattggcaccagttacctgcaatatgtttatcagcagtttggcaataatcgtattttctccagtgcagcttataacgccggaccagggcgggtgcgaacctggcttggcaacagcgccgggcgtatcgacgcagtggcatttgtcgagagtattccattctccgagacgcgcggttatgtgaagaacgtgctggcttatgacgcttactaccgctatttcatgggggataaaccgacgttgatgagcgccacggaatggggacgtcgttactgatccgcacgtttatgatatgctatcgtactctttagcgagtacaaccgggggaggcattttgcttcccccgctaacaatggcgacatattatggcccaacaaagtccctatagtgcagcgatggcagaacagcgtcaccaggagtggttacgttttgtcgacctgcttaagaatgcctaccaaaacgatctccatttaccgttgttaaacctgatgctgacgccagatgagcgcgaagcgttggggactcgcgtgcgtattgtcgaagagctgttgcgcggcgaaatgagccagcgtgagttaaaaaatgaactcggcgcaggcatcgcgacgattacgcgtggatctaacagcctgaaagccgcgcccgtcgagctgcgccagtggctggaagaggtgttgctgaaaagcgattgattttgtaggcctgataagacgtggcgcatcaggcatcgtgcaccgaatgccggatgcggcgtgaacgccttatccgtcctacaaatacccgtaatttcaatatgtttggtaggcatgataagacgcggcagcgtcgcatcaggcgcttaatacacggcattatgaaacggactcagcgccaggatcaccgcctggtgatagacgctggcgcgagtgagtttcccggcggtaaacacgccgatcgccccttccttacgaccaatctcatcaataccggtataacggctcatcacgggaccaagcgcctcaccttcacgcactttttccagaatcaccgcaggcaacggcaaagtagcgctacgcgcctcgccgcgctggctggcgttttcaatcaccacccaactgaaagtgctgtcaccatcgatgccagcttcaatcgccacccaaaaatcagcctctggaagtaaacggcgggcattggctacccgatttcgtgcgccagcgcgcgtttcctcactgccaaagggctgttccggtacaccgctctcgacggcaacggatgcaatatggcaggatccttcgccgaagatctcgtgaaatgcctgcagaatggcctgaattttagcgggattggtggtcgcacagacaacttggtgcataatcagcattactcagaaaattaacgttacagcagtatacggaaaaaaagcatgttacaggtatacctagtccgccacggtgaaacgcagtggaacgccgagcgacgtattcagggccagtctgacagcccgctgaccgccaaaggtgagcaacaggcgatgcaggtggcaacccgtgccaaagagcttggcattacgcatatcatcagtagcgatttaggacgcacccggcgtacggcggaaatcatcgcccaggcctgcggctgtgacatcatctttgattctcgcctgcgtgaattaaacatgggtgtgctggaaaaaagacatatcgattctctgaccgaagaagaagagaactggcgtcggcagctggtcaatggcaccgttgacgggcgtattcctgaaggcgagagtatgcaggagctcagcgatcgcgtcaatgcggcactggaatcttgccgggacttaccgcagggaagccgaccgctgctggtgagtcatggtattgcactgggatgcctggtgagtacgattctcggattaccagcatgggcagagcgccgcttacgtctgcgtaactgttctattagccgcgtggattatcaggaaagcctgtggctggcgtctggctgggtcgttgaaaccgcaggggacatcagccatctggacgcccctgcattagatgagctgcagcgttaacgacggatcggaatcagcagttcacagcgtagattaattgggcgatctcccgctttggcatcttctgccgggtagtatcgctcaatatcctgacctttacggcgcgtcaggttgagcattggcatgcacgttccgtataccgtcaggataaactcctgcacgccggttcccagaccttcataggtaaacatcacatattcgccgccctgcagcatcaccggatgccccgtcagtacatagccatctgcctgatcctgggctaacgcggtggtatagaatacctcttgctcgtcgtctttatcctgactcggacgcgtttcattcaggccgtagagcaccggcggaatggtcggcgcgttgccgagaaaatcgtgccagaactgataacgcatttcatggcggaaatcagagatttgctccaggctacaggagtagctctgggtaacaccaatcagcggcgtatcttccagggtgacaaatttgtgctctggcatagtgaattcacccaggcgtagcggcgggcgaataccaaaggcgctccattcaggagaacggcggtaaagtgcaggagtctgggcaaactgcttcttgaatgcgcgggtaaatgtctgttgagagtcgaagcggtattgcagcgcgatgtccagaatcggacgcgcagtcaggcgtagtgcgaccgcgcttttgctcaaacgacgagcacgaatatacgcgccaatagcatggccagtgacatctttaaacattctctgtaagtgccacttggaataacctgctttcgccgctacattgtcgaggctcaggggctgatccagatgaccttccagccagattaaaaggtcgcgaataatgccggcctgatccataaaatatcctcatcctttcaacaacgagcacctgacatcaggtaattggataatagcattttttgctgttttagcattcagtgtttttttcttagtagagtatgttttagggcttgacggaaataaaagtattgagattttgttcttaatcaatatgttatttaccgtgacgaactaattgctcgtgtaatagataaaaatggtaacaatatgaaatacaagcatttgatcctgtctttaagcctgataatgctggggccattggctcatgcagaagagattggtagcgtcgacaccgtatttaaaatgatcggcccggatcacaaaattgttgtggaagcctttgatgatcccgatgtgaaaaatgtcacctgttatgtgagccgggcgaaaaccggtggtattaaagggggattgggtctggcggaagatacctccgatgcggccatttcttgtcagcaagtcgggccgattgaactgagcgatcgtattaaaaacggcaaagctcagggcgaggtagtattcaaaaaacgcacgtccctggtctttaagagcttacaggtcgtgcgcttttatgatgccaaacgcaacgcgctcgcttatctggcttactccgacaaagttgtagaaggtagcccgaaaaacgcgattagcgcggttcctgtcatgccgtggcggcaataacagaggcgatttatgcaacgggaaacggtctggttagtggaagatgagcaagggatagccgacacgctggtctacatgttgcagcaggaaggttttgccgtcgaggtctttgagcgaggcttgccggtgctggataaagctcgcaagcaggtacccgacgtcatgattctcgatgttggtctgccggatattagcggctttgaattgtgccgccagttactggcgctccatccggcgttacctgtactgttcctgacggcccgaagtgaagaggtcgatcgcctgcttgggctggaaattggtgctgacgactacgtggctaaaccgtttagtccccgcgaagtgtgcgccagggtgcgcaccttactgcgtcgggtgaagaagttcagcacgccgtctcccgtcatccgtattggacattttgaattgaatgaacccgcggcgcagatcagctggtttgacacgccattagcgctgactcggtatgagtttttattgttgaagacgttactcaagagtccgggccgcgtctggtcccgccagcaactgatggatagcgtatgggaagatgcgcaggacacctacgatcgcaccgtcgatacccacattaaaacgctgcgtgccaagctgcgcgccatcaaccccgatcttagtccgattaatactcatcgcggcatgggatatagcctgaggggcctgtaatgcgtatcggcatgcggttgttgctgggctattttttactggtggcggtggcagcctggttcgtactggccatttttgtcaaagaagttaaaccgggcgtgcgaagagcaacggaggggacgttgatcgacaccgcaacgttgctggcggagctggcgcgtcccgatttgctctctggggacccaacgcatgggcaactggcgcaggcgtttaatcagctacaacatcgcccgtttcgcgccaatatcggtggcattaacaaagtgcgcaatgaatatcatgtctatatgaccgatgcgcagggcaaagtattgttcgatagcgcaaataaagccgttggacaggattatagccgctggaatgacgtctggctaacgttgcgtggtcagtatggtgcgcgcagcacgttgcaaaatcctgccgatcccgaaagttctgtgatgtatgttgccgcaccgattatggacggcagccggcttattggcgttttgagcgtaggcaaaccgaacgcggcgatggctccggtcattaagcgtagcgagcggcgaattttatgggccagcgccattttgttggggattgcactggtgattggcgcaggcatggtttggtggatcaaccgctctattgcccggctcactcgctatgctgattccgtcactgacaataagcccgttcctctccccgatctcggtagtagcgagttgcgtaaactcgcgcaggcgctggaaagtatgcgcgtgaagctggaagggaaaaactatattgagcagtatgtttacgcattaactcatgagctaaaaagcccactggcggcgattcgtggagcggcggaaattttacgcgaaggtccgccgccggaagtggtggctcgttttactgacaacattctgacgcaaaatgcgcgtatgcaggcattggtagaaacgttactacgccaggcaagactggagaatcgtcaggaagtcgttctgactgctgttgatgtggcggcattattccgccgcgtcagcgaagcgcgcaccgtgcagttggcagaaaaaaaaatcactctgcatgttacgcccaccgaggttaacgttgctgctgaaccggcgttactggagcaggcgctgggaaatttactggataacgccatcgattttacccccgagagcggttgcatcacgctaagcgccgaagtggatcaggaacacgtcacgcttaaggtgctggataccggtagtggtattcctgactacgcgcttagtcgtatttttgaacgcttttactctttgcctcgtgcaaatgggcaaaaaagcagcggtctggggttggcgttcgtcagtgaggtcgcccgtttgtttaacggcgaagtcacgctgcgcaacgtgcaggaaggtggcgtgctggccagccttcgacttcaccgtcacttcacataacttcaaattcttcccacatagtcttcgtatcctgctgccattgcaaaggagaagactatgttgaaatcccccctgttctggaaaatgactagcctgtttggtgcagtattgctgttgttgattccgataatgctgattcggcaggtgattgtcgaacgtgctgattaccgtagcgatgtggaagatgcgattcgccaaagtaccagcgggccgcaaaaactcgttgggccgctcatcgctattcctgtgaccgagctttatacggtgcaggaagaggataaaaccgtggagcggaaacgaagttttatccatttttggttacctgagagtttgatggttgatggcaatcagaacgtggaagaacgcaagatagggatttataccggtcaggtctggcacagtgatttaacgttaaaagccgatttcgatgttagccgtcttagcgaactcaacgcgccaaatatcaccttaggcaagccatttattgtgattagcgtcggggatgcgcgtggtattggtgtggtgaaagcgcctgaagttaacggaacggcgctgaccattgaacccggcaccgggttagagcaaggcgggcagggcgtgcatatccctttacctgaaggggactggcggaagcagaacctgaagctgaatatggccctgaatttaagcggtaccggcgatctttctgtggtgcctggcgggcgtaatagcgaaatgaccttaaccagcaactggccgcatcccagttttttaggtgattttctaccagccaaacgggaagttagcgagagtggttttcaggcgcactggcaaagcagctggtttgctaataatctcggtgagcgttttgctagtggcaatgataccggctgggaaaacttcccggcgtttagcgtcgcagtaacgacgccagccgatcaataccaattaactgaccgggcgactaagtacgccattctgctgattgcactgacttttatggcgttctttgtttttgaaacgctcaccgcgcaacgtttacacccaatgcaatatttgctggtggggcttagtttggtgatgttttatttgctcttgctggcgctttctgaacataccggttttaccgtggcatggataatcgccagtctgattggggcgataatgaacggtatttatttgcaagcggtattgaaaggttggtgcaacagcatgttgtttaccctcgcgctgttgttgctggatggtgtgatgtggggactgctcaactctgccgatagcgcgctgttgttgggaaccagtgtgctggtggtggcgctggccggcatgatgtttgtgacccgtaatatcgactggtatgcgtttagtctgccgaaaatgaaagccagtaaagaagttacaacggacgatgagttacgtatctggaaataaggttgaaaaataaaaacggcgctaaaaagcgccgttttttttgacggtggtaaagccgattaatcttccagatcaccgcagaagcgataaccttcaccgtgaatggtggcgatgatttccggcgtatccggcgtagattcgaaatgtttacgaatacggcggatcgtcacgtctacagtacggtcgtgcggtttcagctcacggccggtcattttcttcagcagttcagcacgggactgaattttgcctgggttttcacagaagtgaagcatggcgcggaactcgctgcgcggcagcttgtactgctcgccatcagggccgatcaagctacggctgttgatgtccagttcccaaccattgaacttgtagctttcaacgctacgacgttcttcgctgacagtacccagattcatggtacgggacagtaggttgcgtgcacgaatcgtcagttcacgcgggttgaacggtttggtgatgtagtcatctgcaccgatttcgaggccgagaattttatcgacttcgttgtcacggccagtcaggaacatcaacgcaacattcgcctgctcgcgcagttcacgcgctaacagaagaccgttcttacccggcagattgatatccatgatcaccaggttgatgtcatattcagagaggatctgatgcatttccgcgccatctgtcgcttcgaaaacatcatagccttccgcttcgaaaatacttttcaacgtgttgcgtgttaccaactcgtcttcaacgataagaatgtgcggggtctgcatgtttgctacctaaattgccaactaaatcgaaacaggaagtacaaaagtccctgacctgcctgatgcatgctgcaaattaacatgatcggcgtaacatgactaaagtacgtaattgcgttcttgatgcactttccatcaacgtcaacaacatcattagcttggtcgtgggtactttccctcaggacccgacagtgagtaaaacggctgtcatcctaaccattttaacagcaacataacaggctaagaggggccggacacccaataaaactacgcttcgttgacatatatcaagttcaattgtagcacgttaacagtttgatgaaatcatcgtatctaaatgctagctttcgtcacattattttaataatccaactagttgcatcatacaactaataaacgtggtgaatccaattgtcgagatttattttttataaaattatcctaagtaaacagaaggatatgtagcattttttaacaactcaaccgttagtacagtcaggaaatagtttagccttttttaagctaagtaaagggctttttctgcgacttacgttaagaatttgtaaattcgcaccgcgtaataagttgacagtgatcacccggttcgcggttatttgatcaagaagagtggcaatatgcgtataacgattattctggtcgcacccgccagagcagaaaatattggggcagcggcgcgggcaatgaaaacgatggggtttagcgatctgcggattgtcgatagtcaggcacacctggagccagccacccgctgggtcgcacatggatctggtgatattattgataatattaaagttttcccgacattggctgaaagcttacacgatgtcgatttcactgtcgccaccactgcgcgcagtcgggcgaaatatcattactacgccacgccagttgaactggtgccgctgttagaggaaaaatctagttggatgagccatgccgcgctggtgtttggtcgcgaagattccgggttgactaacgaagagttagcgttggctgacgttcttactggtgtgccgatggtggcggattatcctagcctcaatctggggcaggcggtgatggtctattgctatcaattagcaacattaatacaacaaccggcgaaaagtgatgcaacggcagaccaacatcaactgcaagctttacgcgaacgagccatgacattgctgacgactctggcagtggcagatgacataaaactggtcgactggttacaacaacgcctggggcttttagagcaacgagacacggcaatgttgcaccgtttgctgcatgatattgaaaaaaatatcaccaaataaaaaacgccttagtaagtatttttc
